(19) United States
(12) Patent Application Publication
(10) Pub. No.: US 2022/0267773 A1
(43) Pub. Date: Aug. 25, 2022

(54) Targeted RNA cleavage with CRISPR-Cas

(71) Applicant: University of Rochester, Rochester, NY (US)

(72) Inventor: Douglas Matthew Anderson, Pittsford, NY (US)

(21) Appl. No.: 17/628,913

(22) PCT Filed: Jul. 23, 2020
(86) PCT No.: PCT/US20/43267

§ 371 Date: Jan. 21, 2022

Related U.S. Application Data
(60) Provisional application No. 63/000,757, filed on Mar. 27, 2020.
(60) Provisional application No. 63/000,737, filed on Mar. 27, 2020.
(60) Provisional application No. 63/052,282, filed on Jul. 15, 2020.
(60) Provisional application No. 62/877,415, filed on Jul. 23, 2019.

(51) Int. Cl. C12N 15/113; A61P 31/16; C07K 14/005; C12N 15/86; C12N 9/22

(52) U.S. Cl. CPC C12N 15/1131; A61P 31/16; C07K 14/005; C12N 15/86; C12N 9/22; C12N 2760/16122; C07K 2319/60; C12N 2310/20; C07K 2319/85; C12N 2320/32; C12N 2740/16043; C07K 2319/095

(57) ABSTRACT

The present invention provides proteins, nucleic acids, systems and methods for modulating RNA.

### CROSS-REFERENCE TO RELATED APPLICATIONS

[0001] The present application claims priority to U.S. Provisional Application Ser. No. 62/877,415, filed on Jul. 23, 2019, U.S. Provisional Application Ser. No. 63/000,737, filed on Mar. 27, 2020, U.S. Provisional Application Ser. No. 63/000,757, filed on Mar. 27, 2020, and U.S. Provisional Application Ser. No. 63/052,282, filed on Jul. 15, 2020, each of which is incorporated by reference herein in its entirety.

### BACKGROUND

[0002] Human monogenetic diseases can arise from the aberrant expansion of tandem nucleotide repeat sequences, which when transcribed into RNA, can misfold and aggregate into toxic nuclear foci. Nuclear retention of repeat-containing RNAs can disrupt their normal expression and induce widespread splicing defects by sequestering essential RNA binding proteins. Among the most prevalent of these disorders is Myotonic Dystrophy type 1 (DM1), a disease occurring from the expression of a noncoding CTG repeat expansion in the 3′UTR of the human dystrophia myotonica-protein kinase (DMPK) gene.

[0003] Despite intense effort, there are no currently approved therapies designed to treat DM1. Antisense oligonucleotides (ASOs) targeting CUG-repeats have been used to reduce the levels of toxic RNAs and disrupt binding and sequestration of MBNL proteins in animal models. However, significant challenges remain for the delivery of these molecules at therapeutically effective levels in human skeletal muscle. Genome editing approaches using bacterial derived CRISPR-Cas9 DNA endonucleases have been employed to directly edit the DMPK gene locus. However, CRISPR-Cas9 editing at either the 5′ or 3′ ends of CTG genomic repeats can induce large and uncontrolled sequence deletions, and the use of double guide-RNAs flanking the repeat expansion can lead to frequent sequence inversions, which remain toxic. Since CRISPR-Cas9 approaches for manipulating DNA remain inefficient and controversial due to the risk of germline editing, an alternative approach targeting the repeat RNAs using deactivated Cas9 (dCas9) fused to an active ribonuclease has recently been shown to be effective in cells. However, this approach could be inefficient for a number of reasons: 1) dCas9 retains affinity for DNA, which could compete for its binding to RNA, 2) the large size of dCas9 fusion proteins may limit their delivery in vivo or nuclear localization, 3) dCas9 utilizes short guide-RNAs which may increase the chance of off-target RNA cleavage and, 4) they require protospacer adjacent motifs (PAM) for efficient binding, which are not present in most human repeat expansion sequences. Thus, significant challenges remain for the development of efficient therapeutic strategies to target toxic nuclear RNAs in DM1 patients.

[0004] Coronaviruses are enveloped, single-stranded RNA viruses which are widespread in nature and pathogenic in both animal and human populations. Bovine coronavirus is a major cause of calf scours, winter dysentery in adult cows and cause a significant percentage of bovine respiratory disease. In humans, coronaviruses induce pathogenic respiratory diseases, notably SARS, MERS and more recently COVID-19, which have potential to become global pandemics. There are currently no vaccines available to treat human coronavirus infections. In animals, factors limiting vaccine efficacy, such as age, vaccine non-responders and virus mutation, highlights a need for alternative targeted therapeutics to prevent coronavirus-related death and disease.

[0005] Mammalian guide-RNA expression cassettes are generally created by cloning annealed oligonucleotides comprising the guide sequence into a cassette comprised of a mammalian Pol III promoter, a Direct Repeat and a terminator of 6 or more Ts. Commonly, multiple guide-RNAs are expressed by adding addition Pol III promoter cassettes, however this can significantly increase the complexity and size of the vector. Generation of tandem crRNA arrays would significantly decrease the size requirements of the vector; however, nucleotide synthesis of long arrays is prohibited due to size and the repeat nature of DR sequences. Thus, there is a need in the art for compositions, delivery systems and methods for modulating and/or cleaving RNA.

### SUMMARY OF THE INVENTION

[0006] In one aspect, the disclosure provides CRISPR RNAs (crRNAs). In one embodiment, the crRNA comprises a guide sequence, wherein the guide sequence is substantially complementary to a Coronavirus genomic mRNA sequence or a Coronavirus subgenomic mRNA sequence. In one embodiment, the guide sequence is substantially complementary to a Coronavirus leader sequence, Coronavirus S sequence, Coronavirus E sequence, Coronavirus M sequence, N sequence, or Coronavirus S2M sequence. In one embodiment, the guide sequence is substantially complementary to a sequence at least 80% homologous to a sequence selected from SEQ ID NOs: 308-314, 316-321, and 326-327. In one embodiment, the guide sequence comprises a sequence at least 80% homologous to a sequence selected from SEQ ID NOs: 356-391.

[0007] In one embodiment, the crRNA further comprises a direct repeat (DR) sequence. In one embodiment, the the DR sequence is 3′ from the guide sequence. In one embodiment, the DR sequence comprises a sequence selected from SEQ ID NOs: 291-300.

[0008] In one embodiment, the disclosure provides a tandem array comprising at least two crRNA comprising guide sequences of the disclosure which are substantially complementary to a Coronavirus genomic mRNA sequence or a Coronavirus subgenomic mRNA. In one embodiment, each crRNA comprises a guide sequence and a direct repeat (DR) sequence, wherein each DR sequence is different. In one embodiment, the tandem array comprises a sequence at least 80% identical to SEQ ID NO:402.

[0009] In one embodiment, the crRNA comprises a guide sequence, wherein the guide sequence is substantially complementary to an influenza virus genomic RNA sequence or an influenza virus subgenomic RNA sequence. In one embodiment, the guide sequence is substantially complementary to an influenza virus PB2 sequence, influenza virus PB1 sequence, influenza virus PA sequence, influenza virus NP sequence, or influenza virus M sequence. In one embodiment, the guide sequence is substantially complementary to a sequence at least 80% homologous to a sequence selected from SEQ ID NOs:328-34.

[0010] In one embodiment, the crRNA further comprises a direct repeat (DR) sequence. In one embodiment, the the DR sequence is 3′ from the guide sequence. In one embodiment, the DR sequence comprises a sequence selected from SEQ ID NOs: 291-300.

[0011] In one embodiment, the disclosure provides a tandem array comprising at least two crRNA comprising guide sequences of the disclosure which are substantially complementary to an influenza virus genomic RNA sequence or an influenza virus subgenomic RNA sequence. In one embodiment, each crRNA comprises a guide sequence and a direct repeat (DR) sequence, wherein each DR sequence is different. In one embodiment, the tandem array comprises a sequence at least 80% identical to SEQ ID NO:403 or 404.

[0012] In one embodiment the crRNA comprises a guide sequence, wherein the guide sequence is substantially complementary to an expanded RNA repeat. In one embodiment, the expanded repeat is a CTG repeat, CCTG repeat, GGGCC repeat, CAG repeat, CGG repeat, ATTCT repeat, or a TGGAA repeat. In one embodiment, the the guide sequence is substantially complementary to a sequence at least 80% homologous to a sequence selected from SEQ ID NOs: 301-306. In one embodiment, the the guide sequence comprises a sequence at least 80% homologous to a sequence selected from SEQ ID NOs: 348-354.

[0013] In one embodiment, the crRNA further comprises a direct repeat (DR) sequence. In one embodiment, the the DR sequence is 3′ from the guide sequence. In one embodiment, the DR sequence comprises a sequence selected from SEQ ID NOs: 291-300.

[0014] In one embodiment, the disclosure provides a tandem array comprising at least two crRNA comprising guide sequences of the disclosure which are substantially complementary to an expanded RNA repeat. In one embodiment, each crRNA comprises a guide sequence and a direct repeat (DR) sequence, wherein each DR sequence is different.

[0015] In one embodiment, the disclosure provides a composition comprising a crRNA or tandem array of the disclosure. In one embodiment, the composition further comprise a Cas protein or a nucleic acid encoding a Cas protein. In one embodiment, the Cas protein is Cas13. In one embodiment, the Cas protein comprises a sequence at least 80% identical to a sequence selected from SEQ ID NOs:1-46.

[0016] In one embodiment, the Cas protein further comprises a localization signal. In one embodiment, the localization signal is an NES, wherein the NES comprises a sequence at least 80% identical to SEQ ID NO:75-76. In one embodiment, the localization signal is a nuclear localization signal (NLS), wherein the NLS comprises a sequence at least 80% identical to SEQ ID NO:67-74 and 427-1039. In one embodiment, the localization signal comprises a sequence at least 80% identical to SEQ ID NO:77-83.

[0017] In one aspect, the disclosure provides a delivery system for targeted RNA cleavage. In one embodiment, the delivery system comprises a packaging plasmid a transfer plasmid, and an envelope plasmid, wherein the packaging plasmid comprises a nucleic acid sequence encoding a gag-pol polyprotein; the transfer plasmid comprises a nucleic acid sequence encoding a crRNA sequence and a nucleic acid sequence encoding a Cas protein; and the envelope plasmid comprises a nucleic acid sequence encoding an envelope protein. In one embodiment, the envelope protein is a coronavirus spike glycoprotein. In one embodiment, the envelope protein comprises a sequence at least 80% identical to a sequence selected from SEQ ID NO:172-183. In one embodiment, envelope protein comprises one or more proteins selected from influenza virus HA protein and influenza virus NA protein.

[0018] In one aspect, the disclosure provides a method for treating a coronavirus infection. In one embodiment, the method comprises administering to the subject (1) a crRNA comprising guide sequence that is substantially complementary to a Coronavirus genomic mRNA sequence or a Coronavirus subgenomic mRNA sequence or a tandem array comprising two or more crRNA each comprising a guide sequence that is substantially complementary to a Coronavirus genomic mRNA sequence or a Coronavirus subgenomic mRNA sequence; and (2) a Cas protein or nucleic acid encoding a Cas protein. In one embodiment, the crRNA binds to Coronavirus genome RNA or Coronavirus subgenomic RNA and the Cas protein cleaves the Coronavirus genome RNA or Coronavirus subgenomic RNA.

[0019] In one aspect, the disclosure provides a method for treating an influenza virus infection. In one embodiment, the method comprises administering to the subject (1) a crRNA comprising guide sequence that is substantially complementary to an influenza virus genomic RNA sequence or an influenza virus subgenomic RNA sequence or a tandem array comprising two or more crRNA each comprising a guide sequence that is substantially complementary to an influenza virus genomic RNA sequence or an influenza virus subgenomic RNA sequence; and (2) a Cas protein or nucleic acid encoding a Cas protein. In one embodiment, the crRNA binds to influenza genome RNA or influenza subgenomic RNA and the Cas protein cleaves the Coronavirus genome RNA or influenza subgenomic RNA.

[0020] In one aspect, the disclosure provides a method for treating a disease or disorder associated with an expanded RNA repeat, the method comprising administering (1) a crRNA comprising a guide sequence substantially complementary to an expanded RNA repeat or tandem array comprising two or more crRNA each comprising a guide sequence that is substantially complementary to an expanded RNA repeat; and (2) a Cas protein or nucleic acid encoding a Cas protein. In one embodiment, the disease or disorder is selected from the group consisting of Myotonic dystrophy type 1, Amyotrophic Lateral Sclerosis, Huntington's Disease, Huntington's Disease-like 2, Fragile X-associated tremor ataxia syndrome, Spinocerebellar ataxia 1, Spinocerebellar ataxia 2, Spinocerebellar ataxia 3, Spinocerebellar ataxia 6, Spinocerebellar ataxia 7, Spinocerebellar ataxia 17, Spinocerebellar ataxia 8, Spinocerebellar ataxia 10, Spinocerebellar ataxia 31, Spinal and bulbar muscular atrophy, and Dentatorubral-pallidoluysian atrophy.

[0021] In one aspect, the disclosure provides a tandem array comprising two or more crRNAs. In one embodiment, each crRNA comprises a guide sequence and a direct repeat (DR) sequence, wherein each DR sequence is different. In one embodiment, each DR sequence comprises a sequence individually selected from SEQ ID NOs: 291-300.

[0022] In one aspect, the disclosure provides method for treating a viral infection. In one embodiment, the method comprises administering to the subject: a tandem array of any of claims 45-47 and a Cas protein or nucleic acid encoding a Cas protein, wherein the tandem array comprises one or more crRNAs having substantial complementary to viral RNA.

[0023] In one aspect, the disclosure provides a fusion protein. In one embodiment, the fusion protein comprises (a) a CRISPR-associated (Cas) protein; and (b) nuclear localization signal (NLS). In one embodiment, the Cas protein is Cas13. In one embodiment, Cas13 comprises a sequence selected from SEQ ID NOs:1-46, or a variant thereof. In one embodiment, the NLS comprises a sequence selected from SEQ ID NOs: 67-74 and 427-1039, or a variant thereof. In one embodiment, the fusion protein comprises a sequence selected from SEQ ID NOs:150, 151, 161, and 162, or a variant thereof. In one embodiment, the disclosure provides a nucleic acid encoding a fusion protein of the disclosure comprising a Cas protein and a localization signal.

[0024] In one aspect, the disclosure provides a method for decreasing the number of a target RNA or cleaving a target RNA in a subject. In one embodiment, the method comprises administering to the subject: a fusion protein of the disclosure comprising a Cas protein and an NLS or the nucleic acid molecule of the disclosure encoding Cas protein and an NLS and a CRISPR RNA (crRNA) acid comprising a sequence complimentary to a RNA sequence in the target RNA.

[0025] In one aspect, the disclosure provides a fusion protein. In one embodiment, the fusion protein comprises (a) a CRISPR-associated (Cas) protein; and (b) a florescent protein. In one embodiment, the Cas protein is dCas13. In one embodiment, Cas13 comprises a sequence selected from SEQ ID NOs:47-48, or a variant thereof. In one embodiment, the fusion protein further comprises a localization signal or export signal. In one embodiment, the localization signal is an NLS and the NLS comprises a sequence selected from SEQ ID NOs: 67-74 and 427-1039, or a variant thereof. In one embodiment, the localization signal is a nuclear export signal (NES) and the NES comprises a sequence selected from SEQ ID NOs: 74-75, or a variant thereof. In one embodiment, the localization signal comprises a sequence selected from SEQ ID NOs: 67-83 or 427-1039, or a variant thereof. In one embodiment, the fluorescent protein is selected from the group consisting of eGFP, mCherry, sfGFP, sfGFP(1-10), sfGFP(1-10)-L-(11), and 7xS11. IN one embodiment, the fluorescent protein comprises a sequence selected from SEQ ID NO: 49-56, or a variant thereof. In one embodiment, the fusion protein comprises a sequence selected from SEQ ID NOs: 84-149, or a variant thereof. In one embodiment, the disclosure provides a nucleic acid encoding a fusion protein of the disclosure comprising a Cas protein, fluorescent protein and optionally a localization signal.

[0026] In one aspect, the disclosure provides a method of visualizing a target RNA in a subject. In one embodiment, the method comprises administering to the subject: a fusion protein of the disclosure comprising a Cas protein and a fluorescent protein or the nucleic acid molecule of the disclosure encoding a Cas protein and a fluorescent protein and a CRISPR RNA (crRNA) acid comprising a sequence complimentary to a RNA sequence in the target RNA.

[0027] In one aspect, the disclosure provides a fusion protein. In one embodiment, the fusion protein comprises (a) a CRISPR-associated (Cas) protein; and (b) a localization signal. In one embodiment, the Cas protein is Cas13. In one embodiment, Cas13 comprises a sequence selected from SEQ ID NOs:1-46, or a variant thereof. In one embodiment, the localization signal is an NLS and the NLS comprises a sequence selected from SEQ ID NOs: 67-74 and 427-1039, or a variant thereof. In one embodiment, the localization signal is a nuclear export signal (NES) and the NES comprises a sequence selected from SEQ ID NOs: 74-75, or a variant thereof. In one embodiment, the localization signal comprises a sequence selected from SEQ ID NOs: 67-83 or 427-1039, or a variant thereof. In one embodiment, the disclosure provides a nucleic acid encoding a fusion protein of the disclosure comprising a Cas protein and a localization signal.

[0028] In one aspect, the disclosure provides a method for decreasing the number of a target RNA or cleaving a target RNA in a subject. In one embodiment, the method comprises administering to the subject: a fusion protein of the disclosure comprising a Cas protein and an localization signal or the nucleic acid molecule of the disclosure encoding Cas protein and an localization signal and a CRISPR RNA (crRNA) acid comprising a sequence complimentary to a RNA sequence in the target RNA.

[0029] In one aspect, the disclosure provides a synthetic coronavirus envelope protein. In one embodiment, the protein comprises an amino acid sequence selected from SEQ ID NOs:172-183, or a variant thereof. In one embodiment the disclosure provides a nucleic acid molecule encoding a synthetic coronavirus envelope protein of the disclosure.

[0030] In one aspect, the disclosure provides a delivery system for delivering a protein or nucleic acid comprising. In one embodiment, the delivery system comprises a packaging plasmid a transfer plasmid, and an envelope plasmid, wherein the packaging plasmid comprises a nucleic acid sequence encoding a gag-pol polyprotein; the transfer plasmid comprises a nucleic acid sequence encoding the protein or nucleic acid to be delivered; and the envelope plasmid comprises a nucleic acid sequence encoding a synthetic coronavirus envelope of the disclosure.

[0031] In one aspect, the disclosure provides a method of delivering a gene or protein to a respiratory, vascular, renal, or cardiovascular cell type. In one embodiment, the method comprises administering the delivery system of the disclosure to the cell.

### BRIEF DESCRIPTION OF THE DRAWINGS

[0032] FIG. 1, comprising FIG. 1A through FIG. 1D, depicts experimental results demonstrating the development of a robust nuclear localized CRISPR-Cas13 fusion protein for the visualization of toxic RNA foci. FIG. 1A depicts the design of a catalytically dead PspCas13b (dPspCas13b) encoding an N-terminal 3×FLAG and Ty1 NLS and C-terminal eGFP. F—3×FLAG epitope; NLS—Ty1 nuclear localization sequence; pA—SV40 polyadenylation sequence. FIG. 1B depicts a diagram depicting the components of the DT960 vector, which encodes a C-terminal genomic fragment of human DMPK (exons 11-15) with 960 CTG repeat expansion. FIG. 1C depicts the design of the CAGx9 crRNA and its predicted targeting with CUG^{exp} RNA. FIG. 1D depicts representative images showing the cellular localization of hilightR green targeted with either a non-targeting or CAGx9 crRNA in COS7 cells expressing CUG^{exp} RNA. Scale bars, 10 μm.

[0033] FIG. 2, comprising FIG. 2A and FIG. 2B, depicts experimental results demonstrating co-localization of hilightR green with CUG^{exp} foci and MBNL1. FIG. 2A depicts immunohistochemistry using an anti-FLAG antibody was used to detect hilightR red, which co-localized with CUG^{exp} RNA detected using FISH, when targeted with the CAGx9 crRNA. FIG. 2B depicts HilightR green co-localized with mCherry-MBNL1 in COS7 cells expressing CUG^{exp} RNA foci when targeted with the CAGx9 crRNA, but not with a non-targeting crRNA. Scale bars, 10 μm.

[0034] FIG. 3, comprising FIG. 3A and FIG. 3B, depicts experimental results demonstrating degradation of toxic RNA foci by CRISPR-Cas13. FIG. 3A depicts co-expression of active PspCas13b encoding a Ty1 NLS (eraseR) significantly decreased the number of RNA foci in cells expressing CUG^{exp} RNA, when targeted with CAG crRNAs designed with target sequences in all three frames, detected by mCherry-MBNL1. FIG. 24B depicts representative micrographs of cells targeted by eraseR showing foci detected by mCherry-MBNL1, which are significantly decreased in number and appear fainter. Scale bars, 10 μm. **=p-value<0.01, ***=p-value<0.001, ****=p-value<0.0001.

[0035] FIG. 4, comprising FIG. 4A through FIG. 4C, depicts experimental results demonstrating detection of induced CUG^{exp} RNA foci in COS7 cells. FIG. 4A depicts COS7 cells expressing 960 copies of CUG repeats induced RNA foci as detected using FISH with a CAG repeat antisense probe. AF488—Alexa Fluor 488. FIG. 4B depicts expression of CUG^{exp} RNA induces the localization of MBNL1 to foci, as detected using an mCherry-MBNL1 fusion protein. FIG. 4C depicts localization of dPspCas13b-mCherry (hilightR red) guided by either a non-targeting or CAGx9 crRNA in COS7 cells expressing CUG^{exp} RNA. Scale bars, 10 μm.

[0036] FIG. 5 depicts experimental results demonstrating co-localization of hilightR green with splicing speckles. In agreement with previous reports, CUG^{exp} RNA foci marked by hilightR green targeted with a CAGx9 crRNA, co-localized with splicing speckles, as detected using an anti-SC-35 antibody. Scale bars, 10 μm.

[0037] FIG. 6 depicts experimental results demonstrating catalytically dead Cas13 (dCas13) does not significantly reduce the number of CUG^{exp} RNA foci. Expression of dPspCas13b targeted with CAGx9 crRNAs does not significantly reduce the number of CUG^{exp} RNA foci per cell, as detected by mCherry-MBNL1. ns—not significant.

[0038] FIG. 7, comprising FIG. 7A through FIG. 7D, depicts a diagram demonstrating therapeutic modulation of DM1 by CRISPR-Cas13. FIG. 7A depicts that myotonic Dystrophy Type1 is caused by the expansion and expression of a CUG repeat in the 3′ noncoding UTR of the human DMPK gene. This CUG expansion forms stable hairpin structures, which bind and sequester the MBNL family of RNA binding proteins, resulting in widespread defects in alternative splicing and polyadenylation. FIG. 7B depicts CUG repeats are resistant to cleavage induced by Antisense Oligonucleotides (ASO), however, ASOs have been successfully used to block binding of MBNL1 proteins. However, many challenges remain to deliver therapeutically effective levels of ASOs to human tissues. FIG. 7C depicts specific binding of dCas13 guide by a crRNA, or potentially the crRNA alone, can serve to block MBNL proteins and rescue splicing and polyadenylation defects, or when combined with a fluorescent protein, highlight CUG repeat RNA foci. FIG. 7D depicts catalytically active Cas13 can be used to cleave and degrade CUG repeat RNA to prevent MBNL sequestration, as well as other potential CUG repeat-induced pathologies, such as RAN dependent translation of toxic peptides.

[0039] FIG. 8 depicts a schematic showing myotonic dystrophy type 1 (DM1) is an inherited multi-system, progressively debilitating disease occurring in 1 in 8,000 individuals, with an incidence as high as 1 in 500 in specific populations Cardiac complications develop in ˜80% of DM1 patients and is the primary cause of death. DM1 arises from the expansion and expression of a CUG trinucleotide repeat in the noncoding 3′ untranslated region of the human Dystrophia myotonica protein kinase (DMPK) gene. Mutant DMPK mRNAs with greater than ˜50 CUG repeats form toxic nuclear RNA foci, which prevent normal DMPK expression and induce widespread defects in alternative splicing by sequestering members of the muscleblind-like (MBNL) family of RNA binding proteins. Due to the multitude of disrupted muscle genes underlying DM1 pathogenesis, patients often present with a variety of clinical cardiac phenotypes, including atrial and ventricular arrhythmias, dilated cardiomyopathy, and myocardial fibrosis. RNA binding CRISPR-Cas13, when localized with a robust non-classical nuclear localization signal (hilightR and eraseR), can be used to visualize and degrade toxic nuclear RNA foci in cells.

[0040] FIG. 9, comprising FIG. 9A through FIG. 9E, depicts experimental results demonstrating therapeutic rescue of heart function in a mouse model of DM1. FIG. 9A depicts the generation of CUG960 cardiac DM1 mouse model. FIG. 9B depicts the generation of CUG960 cardiac DM1 mouse model. FIG. 9C depicts a diagram of eraseR AAV construct. FIG. 9D depicts experimental results demonstrating heart-specific gene delivery and expression using AAV9. FIG. 9E depicts delivery of eraseR AAV targeting CUGexp RNA reversal of the cellular and electrical abnormalities in DM1 hearts.

[0041] FIG. 10, comprising FIG. 10A through FIG. 10D, depicts strategies to enhance RNA visualization and fusion protein localization with dCas13. FIG. 10A depicts a schematic depicting fusion of single Green Fluorescent Protein (GFP) to catalytically inactive Cas13 (dCas13), which can be used for specific visualization of nuclear RNA repeat foci in cells. FIG. 10B depicts a schematic depicting fluorescent complementation inherent in fluorescent proteins (for example GFP, superfolder GFP, or superfolder Cherry) could be harnessed to reconstitute fluorescent proteins to dCas13 (for example, the complement pair sfGFP 1-10 and sfGFP11). FIG. 10C depicts a schematic depicting tandem assembly of small non-fluorescent components can be used to reconstitute a large tandem array of fluorescent proteins to dCas13, which has the potential to increase the signal to noise ratio of dCas13 targeted RNAs. FIG. 10D depicts a schematic depicting this approach could be similarly useful for targeting fusion proteins (Protein ‘X’) when co-expressed as a fusion to a complementary fluorescent fusion protein (for example, sfGFP1-10).

[0042] FIG. 11 depicts a schematic of the Coronavirus genomic and subgenomic mRNAs.

[0043] FIG. 12 depicts a schematic of the eraseR platform.

[0044] FIG. 13 depicts a schematic of delivery via pseudotyped integration-deficient lentiviral vectors.

[0045] FIG. 14, comprising FIG. 14A through FIG. 14C, depicts a schematic of guide-RNA testing, lentiviral production and cellular targeting. FIG. 14A depicts a schematic of the design of luciferase report construct encoding 5′ and 3′ CoV target sequences. FIG. 14B depict a schematic demonstrating the lentiviral constructs encoding CRISPR-Cas13 components can be packaged into non-integrating lentiviral particles pseudotyped with viral envelope proteins, for example, the Spike glycoprotein from SARS-CoV-2 coronavirus, which provides specificity for entry into ACE2 receptor expressing cells. This allows for specific targeting of ‘coronavirus-targeted’ cell types. FIG. 14C depicts a schematic demonstrating that post-transduction, processing and formation of non-integrating lentiviral episomes allows for transient expression of CRISPR-Cas13 components for acute targeted degradation of CoV genomic and subgenomic viral mRNAs.

[0046] FIG. 15 depicts SARS-CoV-2 leader sequence conservation and targeting sites.

[0047] FIG. 16 depicts tiling of SARS-CoV-2 Leader crRNAs.

[0048] FIG. 17, comprising FIG. 17A through FIG. 17C, depicts validated CRISPR-Cas13 guide-RNAs targeting the SARS-CoV-2 Leader Sequence. FIG. 17A depicts a schematic depicting the Luciferase reporter containing the SARS-2-CoV Leader sequence and crRNA target sites locations. FIG. 17B depicts a sequence alignment of tiling crRNAs targeting SARS-CoV-2 Leader sequence. Transcriptional Regulatory Sequence (TRS) is highlighted in yellow.

[0049] FIG. 17C depicts cell-based luciferase assays demonstrating robust knockdown of CoV Leader Luc reporter activity in cells with crRNAs targeting SARS-CoV-2 leader sequence (crRNAs A through G) or Luciferase coding sequence (Luc), relative to a non-targeting crRNA.

[0050] FIG. 18, comprising FIG. 18A through FIG. 18C depicts, validated CRISPR-Cas13 guide-RNAs targeting the SARS-CoV-2 Stem-loop Like-2 (S2M) Sequence. FIG. 18A depicts a schematic depicting the Luciferase reporter containing the SARS-2-CoV S2M sequence and crRNA target sites locations. FIG. 18B depicts a sequence alignment of tiling crRNAs targeting SARS-CoV-2 S2M sequence. FIG. 18C depicts cell-based luciferase assays demonstrating robust knockdown of CoV S2M Luc reporter activity in cells with crRNAs targeting SARS-CoV-2 S2M sequence (crRNAs A through F) or Luciferase coding sequence (Luc), relative to a non-targeting crRNA.

[0051] FIG. 19, comprising FIG. 19A through FIG. 19E, depicts one-step directional assembly of CRISPR-Cas13 crRNA arrays. FIG. 19A is a schematic depicting the genomic organization of a bacterial CRISPR-Cas13 locus, which typically consists of a single Cas13 protein and CRISPR array containing multiple Spacer and Direct Repeat (DR) sequences. FIG. 19B is a schematic demonstrating that each functional CRISPR guide RNA is processed to include a Spacer and Direct Repeat. Spacer sequences are anti-sense to Target sequences and provide target specificity, whereas the DR sequence acts as a handle for binding to Cas13 protein. FIG. 19C is a schematic depicting that mammalian crRNA expression cassettes are typically constructed by annealing and ligating oligonucleotides comprising a desired spacer sequence. FIG. 19D is a schematic demonstrating that harnessing tolerable nucleotide substitutions within the loop region of the DR, multiple guide-RNAs are efficiently generated in an ordered array FIG. 19E depicts potential tolerable nucleotide substitutions within the loop region of PspCas13b DR which could be harnessed for array assembly.

[0052] FIG. 20, comprising FIG. 20A through FIG. 20C, depicts the identification and validation of non-essential loop residues in Cas13b Direct Repeat (DR). FIG. 20A depicts all possible mutations at positions T17 and T18 of the PspCas13b Direct Repeat. FIG. 20B is a schematic depicting the Luciferase reporter and crRNA target sites locations. FIG. 20C depicts experimental results demonstrating CRISPR-Cas13b knockdown of Luciferase activity with two independent guide RNAs containing individual DR loop mutations.

[0053] FIG. 21, comprising FIG. 21A through FIG. 21C, depicts targeted knockdown of a SARS-CoV-2 Luciferase Reporter with a Guide-RNA array. FIG. 21A is a schematic depicting the lentiviral gene transfer plasmids encoding CRISPR-Cas13 expression cassettes encoding either single or triple guide RNA arrays. FIG. 21B is a schematic of a Luciferase reporter containing multiple SARS-CoV-2 viral sequences within the 5′ and 3′ UTRs. FIG. 21C depicts experimental results demonstrating relative luciferase activity knockdown through expression of CRISPR-Cas13 RNA targeting components driven by single (LDR-D) or triple guide-RNAs (LDR-D/N-B/S2M-D) targeting the SARS-CoV-2 luciferase reporter, relative to negative control non-targeting crRNA (NC).

[0054] FIG. 22 is a schematic of the CRISPR-Cas13 expression cassette encoding triple guide RNAs can be packaged in AAV viral vectors.

[0055] FIG. 23, comprising FIG. 23A and FIG. 23B, is a schematic of the influenza virus. FIG. 23A is a schematic of Influenza viral RNAs (vRNAs). Influenza is an enveloped, negative-sense RNA virus which is composed of 8 vRNA segments. FIG. 23A is a schematic of influenza virus particles. All eight vRNAs are packed within an enveloped virus which utilizes viral proteins HA and NA for host cell binding and fusion.

[0056] FIG. 24, comprising FIG. 24A and FIG. 24B, is a schematic of the Packaging and Delivery CRISPR-Cas13 RNA editing components to target Influenza. FIG. 24A is a schematic demonstrating that the CRISPR-Cas13 editing components, including a CRISPR guide RNA array and Cas13 protein, can be packaged into viral gene therapy vectors, for example, integration deficient lentiviral vectors. Pseudotyping of lentiviral vectors with Influenza NA and HA envelope proteins is one method for delivery to host cells targeted by Influenza virus. FIG. 24A is a schematic demonstrating that upon viral vector fusion and delivery, expression of CRISPR-Cas13 components will result in targeted degradation of vRNAs or viral mRNAs. For targeting of vRNAs, robust nuclear localization of Cas13 protein may be necessary.

[0057] FIG. 25, comprising FIG. 25A and FIG. 26B depicts experimental results demonstrating comparative knockdown of a DM1 luciferase reporter between CRISPR-Cas13a,-b, and -d subtypes. FIG. 25A is a schematic depicting the DM1 Luciferase reporter (pGL3P-DT960) which contains human DMPK Exon15 sequence encoding a 960 CUG repeat located in the 3′ UTR of the luciferase reporter pGL3P. Relative target sites for Luciferase (Luc) and CAG crRNAs targeting CUG repeats are depicted. FIG. 25B depicts the relative luciferase reporter activities for knockdown of pGL3P-DT960 targeting Luciferase and CUG repeats are shown for eraseR (PspCas13b-Ty1NLS), RfxCas13d (CasRx-NLS) and LwCas13a.

[0058] FIG. 26, comprising FIG. 26A through FIG. 26C, depicts experimental results demonstrating targeted clearance of toxic nuclear RNA foci by CRISPR-Cas13 subtypes. FIG. 26A depicts the relative knockdown of toxic nuclear RNA foci, induced by expression of an RNA containing 960 copies of a CUG expansion repeat, PspCas13b-Ty1NLS. FIG. 26B the relative knockdown knockdown of toxic nuclear RNA foci, induced by expression of an RNA containing 960 copies of a CUG expansion repeat, RfxCas13d(CasRx-NLS). FIG. 26C the relative knockdown knockdown of toxic nuclear RNA foci, induced by expression of an RNA containing 960 copies of a CUG expansion repeat, LwCas13a. Nuclear foci were labeled by co-expression of an mCherry-MBNL1 fusion protein and imaged using confocal microscopy

[0059] FIG. 27, comprising FIG. 27A and FIG. 27B, depicts experimental results demonstrating pseudotyping lentiviral vectors with SARS-CoV spike envelope proteins. FIG. 27A is a schematic demonstrating that N and C-terminal modifications (4LV) are required for pseudotyping lentivirus with CoV Spike proteins from SARS-Cov-1 and SARS-CoV-2. FIG. 27B depicts experimental results demonstrating that wild type (WT) CoV spike proteins are not suitable for pseudotyping lentivirus for transduction of HEK293T cells or HEK293T cells expressing human ACE2 (ACE2-HEK293T). Expression of the human ACE2 receptor in HEK293T cells is both necessary and sufficient for transduction by 4LV pseudotyped lentiviral vectors. VSV-G envelopes allow for pseudotyping lentivirus for broad transduction of many cell types in vitro, independent of ACE2 expression.

### DETAILED DESCRIPTION

[0060] In one aspect, the disclosure provides novel CRISPR RNAs (crRNAs) for targeting a viral RNA such as a coronavirus or an influenza virus. For example, in one embodiment, the crRNA comprises a guide sequence that is substantially complementary to a coronavirus genomic mRNA, coronavirus sub-genomic mRNA, influenza virus genomic RNA, or influenza virus sub-genomic RNA. In one embodiment, the crRNA comprises a guide sequence that is substantially complementary to a Coronavirus leader sequence, Coronavirus S sequence, Coronavirus E sequence, Coronavirus M sequence, N sequence, or Coronavirus S2M sequence. In one embodiment, the the crRNA comprises a guide sequence is substantially complementary to an influenza virus PB2 sequence, influenza virus PB1 sequence, influenza virus PA sequence, influenza virus NP sequence, or influenza virus M sequence.

[0061] In one aspect, the disclosure provides a crRNA tandem array. In one embodiment, the tandem array comprises two or more, three or more, four or more, five or more six or more, seven or more or eight or more crRNA sequences. In one embodiment, each crRNA in the tandem crRNA array comprises a direct repeat (DR) sequence. The DR sequence of each crRNA array can be different. For example, in one embodiment, at least one of the DR sequences includes a single mutation in the poly T stretch.

[0062] In one aspect, the disclosure is based on the development of novel proteins which provide targeted RNA cleavage. In one embodiment, the fusion protein comprises a Cas protein, and optionally a localization signal. These proteins allow for specific localization of Cas proteins providing targeted RNA cleavage. In one embodiment, the Cas protein has RNA binding activity. In one embodiment, Cas protein is Cas13. In one embodiment, the localization signal is a nuclear localization signal, nuclear export signal or other localization signal that localizes the protein to an extracellularly or to an organelle such as the nucleolus, ribosome, vesicle, rough endoplasmic reticulum, Golgi apparatus, cytoskeleton, smooth endoplasmic reticulum, mitochondria, vacuole, cytosol, lysosome, or centriole.

[0063] In one aspect, the disclosure is based on the development of novel fusion proteins which provide targeted RNA visualization. In one embodiment, the fusion protein comprises a catalytically dead Cas protein, a fluorescent protein, and optionally a localization signal. In one embodiment, the fusion protein combines the visualization capability of the fluorescent protein and the programmable DNA targeting capability of catalytically dead Cas. These fusion proteins allow for specific localization of Cas proteins providing for targeted RNA visualization. In one embodiment, the Cas protein has RNA binding activity. In one embodiment, Cas protein is dCas13. In one embodiment, the localization signal is a nuclear localization signal, nuclear export signal or other localization signal that localizes the protein to an extracellularly or to an organelle such as the nucleolus, ribosome, vesicle, rough endoplasmic reticulum, Golgi apparatus, cytoskeleton, smooth endoplasmic reticulum, mitochondria, vacuole, cytosol, lysosome, or centriole.

### Definitions

[0064] Unless defined otherwise, all technical and scientific terms used herein have the same meaning as commonly understood by one of ordinary skill in the art to which this invention belongs.

[0065] Generally, the nomenclature used herein and the laboratory procedures in cell culture, molecular genetics, organic chemistry, and nucleic acid chemistry and hybridization are those well-known and commonly employed in the art.

[0066] Standard techniques are used for nucleic acid and peptide synthesis. The techniques and procedures are generally performed according to conventional methods in the art and various general references (e.g., Sambrook and Russell, 2012, Molecular Cloning, A Laboratory Approach, Cold Spring Harbor Press, Cold Spring Harbor, N.Y., and Ausubel et al., 2012, Current Protocols in Molecular Biology, John Wiley & Sons, NY), which are provided throughout this document.

[0067] The nomenclature used herein, and the laboratory procedures used in analytical chemistry and organic syntheses described below are those well-known and commonly employed in the art. Standard techniques or modifications thereof are used for chemical syntheses and chemical analyses.

[0068] The term “a,” “an,” “the” and similar terms used in the context of the present invention (especially in the context of the claims) are to be construed to cover both the singular and plural unless otherwise indicated herein or clearly contradicted by the context. “About” as used herein when referring to a measurable value such as an amount, a temporal duration, and the like, is meant to encompass variations of ±20%, or ±10%, or ±5%, or ±1%, or ±0.1% from the specified value, as such variations are appropriate to perform the disclosed methods.

[0069] “Antisense” refers particularly to the nucleic acid sequence of the non-coding strand of a double stranded DNA molecule encoding a protein, or to a sequence which is substantially homologous to the non-coding strand. As defined herein, an antisense sequence is complementary to the sequence of a double stranded DNA molecule encoding a protein. It is not necessary that the antisense sequence be complementary solely to the coding portion of the coding strand of the DNA molecule. The antisense sequence may be complementary to regulatory sequences specified on the coding strand of a DNA molecule encoding a protein, which regulatory sequences control expression of the coding sequences.

[0070] A “disease” is a state of health of an animal wherein the animal cannot maintain homeostasis, and wherein if the disease is not ameliorated then the animal's health continues to deteriorate.

[0071] In contrast, a “disorder” in an animal is a state of health in which the animal is able to maintain homeostasis, but in which the animal's state of health is less favorable than it would be in the absence of the disorder. Left untreated, a disorder does not necessarily cause a further decrease in the animal's state of health.

[0072] A disease or disorder is “alleviated” if the severity of a sign or symptom of the disease or disorder, the frequency with which such a sign or symptom is experienced by a patient, or both, is reduced.

[0073] “Encoding” refers to the inherent property of specific sequences of nucleotides in a polynucleotide, such as a gene, a cDNA, or an mRNA, to serve as templates for synthesis of other polymers and macromolecules in biological processes having either a defined sequence of nucleotides (i.e., rRNA, tRNA and mRNA) or a defined sequence of amino acids and the biological properties resulting therefrom. Thus, a gene encodes a protein if transcription and translation of mRNA corresponding to that gene produces the protein in a cell or other biological system. Both the coding strand, the nucleotide sequence of which is identical to the mRNA sequence and is usually provided in sequence listings, and the non-coding strand, used as the template for transcription of a gene or cDNA, can be referred to as encoding the protein or other product of that gene or cDNA.

[0074] The terms “patient,” “subject,” “individual,” and the like are used interchangeably herein, and refer to any animal or cell whether in vitro or in vivo, amenable to the methods described herein. In one embodiment, the subjects include vertebrates and invertebrates. Invertebrates include, but are not limited to, Drosophila melanogaster and Caenorhabditis elegans. Vertebrates include, but are not limited to, primates, rodents, domestic animals or game animals. Primates include, but are not limited to, chimpanzees, cynomologous monkeys, spider monkeys, and macaques (e.g., Rhesus). Rodents include, but are not limited to, mice, rats, woodchucks, ferrets, rabbits and hamsters. Domestic and game animals include, but are not limited to, cows, horses, pigs, deer, bison, buffalo, feline species (e.g., domestic cat), canine species (e.g., dog, fox, wolf), avian species (e.g., chicken, emu, ostrich), and fish (e.g., zebrafish, trout, catfish and salmon). In some embodiments, the subject is a mammal, e.g., a primate, e.g., a human. In certain non-limiting embodiments, the patient, subject or individual is a human.

[0075] By the term “specifically binds,” as used herein with respect to an antibody, is meant an antibody which recognizes a specific antigen, but does not substantially recognize or bind other molecules in a sample. For example, an antibody that specifically binds to an antigen from one species may also bind to that antigen from one or more species. But, such cross-species reactivity does not itself alter the classification of an antibody as specific. In another example, an antibody that specifically binds to an antigen may also bind to different allelic forms of the antigen. However, such cross reactivity does not itself alter the classification of an antibody as specific.

[0076] In some instances, the terms “specific binding” or “specifically binding,” can be used in reference to the interaction of an antibody, a protein, or a peptide with a second chemical species, to mean that the interaction is dependent upon the presence of a particular structure (e.g., an antigenic determinant or epitope) on the chemical species; for example, an antibody recognizes and binds to a specific protein structure rather than to proteins generally. If an antibody is specific for epitope “A”, the presence of a molecule containing epitope A (or free, unlabeled A), in a reaction containing labeled “A” and the antibody, will reduce the amount of labeled A bound to the antibody.

[0077] A “coding region” of a gene consists of the nucleotide residues of the coding strand of the gene and the nucleotides of the non-coding strand of the gene which are homologous with or complementary to, respectively, the coding region of an mRNA molecule which is produced by transcription of the gene.

[0078] A “coding region” of a mRNA molecule also consists of the nucleotide residues of the mRNA molecule which are matched with an anti-codon region of a transfer RNA molecule during translation of the mRNA molecule or which encode a stop codon. The coding region may thus include nucleotide residues comprising codons for amino acid residues which are not present in the mature protein encoded by the mRNA molecule (e.g., amino acid residues in a protein export signal sequence).

[0079] “Complementary” as used herein to refer to a nucleic acid, refers to the broad concept of sequence complementarity between regions of two nucleic acid strands or between two regions of the same nucleic acid strand. It is known that an adenine residue of a first nucleic acid region is capable of forming specific hydrogen bonds (“base pairing”) with a residue of a second nucleic acid region which is antiparallel to the first region if the residue is thymine or uracil. Similarly, it is known that a cytosine residue of a first nucleic acid strand is capable of base pairing with a residue of a second nucleic acid strand which is antiparallel to the first strand if the residue is guanine. A first region of a nucleic acid is complementary to a second region of the same or a different nucleic acid if, when the two regions are arranged in an antiparallel fashion, at least one nucleotide residue of the first region is capable of base pairing with a residue of the second region. In one embodiment, the first region comprises a first portion and the second region comprises a second portion, whereby, when the first and second portions are arranged in an antiparallel fashion, at least about 50%, at least about 75%, at least about 90%, or at least about 95% of the nucleotide residues of the first portion are capable of base pairing with nucleotide residues in the second portion. In one embodiment, all nucleotide residues of the first portion are capable of base pairing with nucleotide residues in the second portion.

[0080] The term “DNA” as used herein is defined as deoxyribonucleic acid.

[0081] The term “expression” as used herein is defined as the transcription and/or translation of a particular nucleotide sequence driven by its promoter.

[0082] The term “expression vector” as used herein refers to a vector containing a nucleic acid sequence coding for at least part of a gene product capable of being transcribed. In some cases, RNA molecules are then translated into a protein, polypeptide, or peptide. In other cases, these sequences are not translated, for example, in the production of antisense molecules, siRNA, ribozymes, and the like. Expression vectors can contain a variety of control sequences, which refer to nucleic acid sequences necessary for the transcription and possibly translation of an operatively linked coding sequence in a particular host organism. In addition to control sequences that govern transcription and translation, vectors and expression vectors may contain nucleic acid sequences that serve other functions as well.

[0083] As used herein the term “wild type” is a term of the art understood by skilled persons and means the typical form of an organism, strain, gene or characteristic as it occurs in nature as distinguished from mutant or variant forms.

[0084] The term “homology” refers to a degree of complementarity. There may be partial homology or complete homology (i.e., identity). Homology is often measured using sequence analysis software (e.g., Sequence Analysis Software Package of the Genetics Computer Group. University of Wisconsin Biotechnology Center. 1710 University Avenue. Madison, Wis. 53705). Such software matches similar sequences by assigning degrees of homology to various substitutions, deletions, insertions, and other modifications. Conservative substitutions typically include substitutions within the following groups: glycine, alanine; valine, isoleucine, leucine; aspartic acid, glutamic acid, asparagine, glutamine; serine, threonine; lysine, arginine; and phenylalanine, tyrosine.

[0085] By “nucleic acid” is meant any nucleic acid, whether composed of deoxyribonucleosides or ribonucleosides, and whether composed of phosphodiester linkages or modified linkages such as phosphotriester, phosphoramidate, siloxane, carbonate, carboxymethylester, acetamidate, carbamate, thioether, bridged phosphoramidate, bridged methylene phosphonate, phosphorothioate, methylphosphonate, phosphorodithioate, bridged phosphorothioate or sulfone linkages, and combinations of such linkages. The term nucleic acid also specifically includes nucleic acids composed of bases other than the five biologically occurring bases (adenine, guanine, thymine, cytosine and uracil). The term “nucleic acid” typically refers to large polynucleotides.

[0086] Conventional notation is used herein to describe polynucleotide sequences: the left-hand end of a single-stranded polynucleotide sequence is the 5′-end; the left-hand direction of a double-stranded polynucleotide sequence is referred to as the 5′-direction.

[0087] The direction of 5′ to 3′ addition of nucleotides to nascent RNA transcripts is referred to as the transcription direction. The DNA strand having the same sequence as an mRNA is referred to as the “coding strand”; sequences on the DNA strand which are located 5′ to a reference point on the DNA are referred to as “upstream sequences”; sequences on the DNA strand which are 3′ to a reference point on the DNA are referred to as “downstream sequences.”

[0088] In the context of the present invention, the following abbreviations for the commonly occurring nucleic acid bases are used. “A” refers to adenosine, “C” refers to cytosine, “G” refers to guanosine, “T” refers to thymidine, and “U” refers to uridine.

[0089] As used herein, the terms “peptide,” “polypeptide,” and “protein” are used interchangeably, and refer to a compound comprised of amino acid residues covalently linked by peptide bonds. A protein or peptide must contain at least two amino acids, and no limitation is placed on the maximum number of amino acids that can comprise a protein's or peptide's sequence. Polypeptides include any peptide or protein comprising two or more amino acids joined to each other by peptide bonds. As used herein, the term refers to both short chains, which also commonly are referred to in the art as peptides, oligopeptides and oligomers, for example, and to longer chains, which generally are referred to in the art as proteins, of which there are many types. “Polypeptides” include, for example, biologically active fragments, substantially homologous polypeptides, oligopeptides, homodimers, heterodimers, variants of polypeptides, modified polypeptides, derivatives, analogs, fusion proteins, among others. The polypeptides include natural peptides, recombinant peptides, synthetic peptides, or a combination thereof.

[0090] The term “RNA” as used herein is defined as ribonucleic acid.

[0091] “Variant” as the term is used herein, is a nucleic acid sequence or a peptide sequence that differs in sequence from a reference nucleic acid sequence or peptide sequence respectively, but retains essential biological properties of the reference molecule. Changes in the sequence of a nucleic acid variant may not alter the amino acid sequence of a peptide encoded by the reference nucleic acid, or may result in amino acid substitutions, additions, deletions, fusions and truncations. Changes in the sequence of peptide variants are typically limited or conservative, so that the sequences of the reference peptide and the variant are closely similar overall and, in many regions, identical. A variant and reference peptide can differ in amino acid sequence by one or more substitutions, additions, deletions in any combination. A variant of a nucleic acid or peptide can be a naturally occurring such as an allelic variant, or can be a variant that is not known to occur naturally. Non-naturally occurring variants of nucleic acids and peptides may be made by mutagenesis techniques or by direct synthesis.

[0092] A “vector” is a composition of matter which comprises an isolated nucleic acid and which can be used to deliver the isolated nucleic acid to the interior of a cell. Numerous vectors are known in the art including, but not limited to, linear polynucleotides, polynucleotides associated with ionic or amphiphilic compounds, plasmids, and viruses. Thus, the term “vector” includes an autonomously replicating plasmid or a virus. The term should also be construed to include non-plasmid and non-viral compounds which facilitate transfer of nucleic acid into cells, such as, for example, polylysine compounds, liposomes, and the like. Examples of viral vectors include, but are not limited to, adenoviral vectors, adeno-associated virus vectors, retroviral vectors, and the like.

[0093] Ranges: throughout this disclosure, various aspects of the invention can be presented in a range format. It should be understood that the description in range format is merely for convenience and brevity and should not be construed as an inflexible limitation on the scope of the invention. Accordingly, the description of a range should be considered to have specifically disclosed all the possible subranges as well as individual numerical values within that range. For example, description of a range such as from 1 to 6 should be considered to have specifically disclosed subranges such as from 1 to 3, from 1 to 4, from 1 to 5, from 2 to 4, from 2 to 6, from 3 to 6 etc., as well as individual numbers within that range, for example, 1, 2, 2.7, 3, 4, 5, 5.3, and 6. This applies regardless of the breadth of the range.

### Proteins

[0094] In one aspect, the present disclosure is based on the development of novel editing proteins which provide targeted RNA cleavage. In some embodiment, the proteins comprise a localization signal. In one embodiment, the localization signal localizes the protein to the site in which a target RNA is located. In one embodiment, the protein comprises a nuclear localization signal (NLS), to target RNA in the nucleus. In one embodiment, the protein comprises an nuclear export signal (NES), to target RNA in the cytoplasm. Other localization signals can be used (and which are known in the art) to target RNA in organelles, such as mitochondria. In other embodiments, the protein does not comprise an NLS, to target RNA in the cytoplasm. In one embodiment, the protein comprises a purification and/or detection tag.

[0095] The present disclosure also provides novel fusions of an editing protein and a fluorescent protein. In one embodiment, the fusion protein combines the visualization capability of the fluorescent protein and the programmable nucleic acid targeting capability of catalytically dead Cas. In one embodiment, the fusion protein comprises a nuclear localization signal, to target RNA in the nucleus. In some embodiments, the fusion protein comprises a nuclear export signal (NES), to target RNA in the cytoplasm. In other embodiments, the fusion protein does not comprise an NLS, to target RNA in the cytoplasm. Other localization signals can be used (and which are known in the art) to target RNA in organelles, such as mitochondria. In one embodiment, the fusion protein comprises a linker. In one embodiment, the linker links the Cas protein and fluorescent protein. In one embodiment, the fusion protein comprises a purification and/or detection tag.

### EraseR

[0096] In one aspect, the present disclosure is based on the development of novel editing proteins which provide targeted RNA cleavage and are effectively delivered. In some embodiment, the proteins comprise a localization signal. In one embodiment, the localization signal localizes the protein to the site in which a target RNA is located. In one embodiment, the protein comprises a purification and/or detection tag. In one embodiment, the protein comprises a purification and/or detection tag.

[0097] Editing Protein

[0098] In one embodiment, the editing protein includes, but is not limited to, a CRISPR-associated (Cas) protein, a zinc finger nuclease (ZFN) protein, and a protein having a DNA or RNA binding domain.

[0099] Non-limiting examples of Cas proteins include Cas1, Cas1B, Cas2, Cas3, Cas4, Cas5, Cash, Cas7, Cas8, Cas9, Cas10, Csy1, Csy2, Csy3, Cse1, Cse2, Csc1, Csc2, Csa5, Csn2, Csm2, Csm3, Csm4, Csm5, Csm6, Cmr1, Cmr3, Cmr4, Cmr5, Cmr6, Csb1, Csb2, Csb3, Csx17, Csx14, Csx10, Csx16, CsaX, Csx3, Csx1, Csx15, Csf1, Csf2, Csf3, Csf4, SpCas9, StCas9, NmCas9, SaCas9, CjCas9, CjCas9, AsCpf1, LbCpf1, FnCpf1, VRER SpCas9, VQR SpCas9, xCas9 3.7, homologs thereof, orthologs thereof, or modified versions thereof. In some embodiments, the Cas protein has DNA or RNA cleavage activity. In some embodiments, the Cas protein directs cleavage of one or both strands of a nucleic acid molecule at the location of a target sequence, such as within the target sequence and/or within the complement of the target sequence. In some embodiments, the Cas protein directs cleavage of one or both strands within about 1, 2, 3, 4, 5, 6, 7, 8, 9, 10, 15, 20, 25, 50, 100, 200, 500, or more base pairs from the first or last nucleotide of a target sequence. In one embodiment, the Cas protein is Cas9, Cas13, or Cpf1. In one embodiment, Cas protein is catalytically deficient (dCas).

[0100] In one embodiment, the Cas protein has RNA binding activity. In one embodiment, Cas protein is Cas13. In one embodiment, the Cas protein is PspCas13b, PspCas13b Truncation, AdmCas13d, AspCas13b, AspCas13c, BmaCas13a, BzoCas13b, CamCas13a, CcaCas13b, Cga2Cas13a, CgaCas13a, EbaCas13a, EreCas13a, EsCas13d, FbrCas13b, FnbCas13c, FndCas13c, FnfCas13c, FnsCas13c, FpeCas13c, FulCas13c, HheCas13a, LbfCas13a, LbmCas13a, LbnCas13a, LbuCas13a, LseCas13a, LshCas13a, LspCas13a, Lwa2cas13a, LwaCas13a, LweCas13a, PauCas13b, PbuCas13b, PgiCas13b, PguCas13b, Pin2Cas13b, Pin3Cas13b, PinCas13b, Pprcas13a, PsaCas13b, PsmCas13b, RaCas13d, RanCas13b, RcdCas13a, RcrCas13a, RcsCas13a, RfxCas13d, UrCas13d, dPspCas13b, PspCas13b_A133H, PspCas13b_A1058H, dPspCas13b truncation, dAdmCas13d, dAspCas13b, dAspCas13c, dBmaCas13a, dBzoCas13b, dCamCas13a, dCcaCas13b, dCga2Cas13a, dCgaCas13a, dEbaCas13a, dEreCas13a, dEsCas13d, dFbrCas13b, dFnbCas13c, dFndCas13c, dFnfCas13c, dFnsCas13c, dFpeCas13c, dFulCas13c, dHheCas13a, dLbfCas13a, dLbmCas13a, dLbnCas13a, dLbuCas13a, dLseCas13a, dLshCas13a, dLspCas13a, dLwa2cas13a, dLwaCas13a, dLweCas13a, dPauCas13b, dPbuCas13b, dPgiCas13b, dPguCas13b, dPin2Cas13b, dPin3Cas13b, dPinCas13b, dPprCas13a, dPsaCas13b, dPsmCas13b, dRaCas13d, dRanCas13b, dRcdCas13a, dRcrCas13a, dRcsCas13a, dRfxCas13d, or dUrCas13d. Additional Cas proteins are known in the art (e.g., Konermann et al., Cell, 2018, 173:665-676 e14, Yan et al., Mol Cell, 2018, 7:327-339 e5; Cox, D. B. T., et al., Science, 2017, 358: 1019-1027; Abudayyeh et al., Nature, 2017, 550: 280-284, Gootenberg et al., Science, 2017, 356: 438-442; and East-Seletsky et al., Mol Cell, 2017, 66: 373-383 e3, which are herein incorporated by reference).

[0101] In one embodiment, the Cas protein comprises a sequence at least 70%, at least 71%, at least 72%, at least 73%, at least 74%, at least 75%, at least 76%, at least 77%, at least 78%, at least 79%, at least 80%, at least 81%, at least 82%, at least 83%, at least 84%, at least 85%, at least 86%, at least 87%, at least 88%, at least 89%, at least 90%, at least 91%, at least 92%, at least 93%, at least 94%, at least 95%, at least 96%, at least 97%, at least 98%, or at least 99% identical to one of SEQ ID NOs:1-48. In one embodiment, the Cas protein comprises a sequence at least 70%, at least 71%, at least 72%, at least 73%, at least 74%, at least 75%, at least 76%, at least 77%, at least 78%, at least 79%, at least 80%, at least 81%, at least 82%, at least 83%, at least 84%, at least 85%, at least 86%, at least 87%, at least 88%, at least 89%, at least 90%, at least 91%, at least 92%, at least 93%, at least 94%, at least 95%, at least 96%, at least 97%, at least 98%, or at least 99% identical to one of SEQ ID NOs: 1-46. In one embodiment, the Cas protein comprises a sequence of one of SEQ ID NOs:1-48. In one embodiment, the Cas protein comprises a sequence of one of SEQ ID NOs:1-46.

[0102] Localization Signal

[0103] In some embodiments, the protein may contain a localization signal, such as an nuclear localization signal (NLS), nuclear export signal (NES) or other localization signals to localize to organelles, such as mitochondria, or to localize in the cytoplasm. In one embodiment, the localization signal localizes the protein to the site in which a target RNA is located.

[0104] Nuclear Localization Signal

[0105] In one embodiment, the protein comprises a NLS. In one embodiment, the NLS is a retrotransposon NLS. In one embodiment, the NLS is derived from Ty1, yeast GAL4, SKI3, L29 or histone H2B proteins, polyoma virus large T protein, VP1 or VP2 capsid protein, SV40 VP1 or VP2 capsid protein, Adenovirus E1 a or DBP protein, influenza virus NS1 protein, hepatitis vims core antigen or the mammalian lamin, c-myc, max, c-myb, p53, c-erbA, jun, Tax, steroid receptor or Mx proteins, Nucleoplasmin (NPM2), Nucleophosmin (NPM1), or simian vims 40 (“SV40”) T-antigen. In one embodiment, the NLS is a Ty1 or Ty1-derived NLS, a Ty2 or Ty2-derived NLS or a MAK11 or MAK11-derived NLS. In one embodiment, the Ty1 NLS comprises an amino acid sequence of SEQ ID NO:67. In one embodiment, the Ty2 NLS comprises an amino acid sequence of SEQ ID NO:68. In one embodiment, the MAK11 NLS comprises an amino acid sequence of SEQ ID NO:69. In one embodiment, the NLS comprises a sequence at least 70%, at least 71%, at least 72%, at least 73%, at least 74%, at least 75%, at least 76%, at least 77%, at least 78%, at least 79%, at least 80%, at least 81%, at least 82%, at least 83%, at least 84%, at least 85%, at least 86%, at least 87%, at least 88%, at least 89%, at least 90%, at least 91%, at least 92%, at least 93%, at least 94%, at least 95%, at least 96%, at least 97%, at least 98%, or at least 99% identical to one of SEQ ID NOs: 67-74 and 427-1039. In one embodiment, the NLS comprises a sequence of one of SEQ ID NOs: 67-74 and 427-1039.

[0106] In one embodiment, the NLS is a Ty1-like NLS. For example, in one embodiment, the Ty1-like NLS comprises KKRX motif. In one embodiment, the Ty1-like NLS comprises KKRX motif at the N-terminal end. In one embodiment, the Ty1-like NLS comprises KKR motif. In one embodiment, the Ty1-like NLS comprises KKR motif at the C-terminal end. In one embodiment, the Ty1-like NLS comprises a KKRX and a KKR motif. In one embodiment, the Ty1-like NLS comprises a KKRX at the N-terminal end and a KKR motif at the C-terminal end. In one embodiment, the Ty1-like NLS comprises at least 20 amino acids. In one embodiment, the Ty1-like NLS comprises between 20 and 40 amino acids. In one embodiment, the Ty1-like NLS comprises a sequence at least 70%, at least 71%, at least 72%, at least 73%, at least 74%, at least 75%, at least 76%, at least 77%, at least 78%, at least 79%, at least 80%, at least 81%, at least 82%, at least 83%, at least 84%, at least 85%, at least 86%, at least 87%, at least 88%, at least 89%, at least 90%, at least 91%, at least 92%, at least 93%, at least 94%, at least 95%, at least 96%, at least 97%, at least 98%, or at least 99% identical to one of SEQ ID NOs: 427-1039. In one embodiment, the NLS comprises a sequence of one of SEQ ID NOs: 427-1039, wherein the sequence comprises one or more, two or more, three or more, four or more, five or more, six or more, seven or more, eight or more, nine or more, or ten or more, insertions, deletions or substitutions. In one embodiment, the Ty1-like NLS comprises a sequence of one of SEQ ID NOs: 427-1039.

[0107] In one embodiment, the NLS comprises two copies of the same NLS. For example, in one embodiment, the NLS comprises a multimer of a first Ty1-derived NLS and a second Ty1-derived NLS.

[0108] Nuclear Export Signal

[0109] In one embodiment, the protein comprises a Nuclear Export Signal (NES). In one embodiment, the NES is attached to the N-terminal end of the Cas protein. In one embodiment, the NES localizes the protein to the cytoplasm for targeting cytoplasmic RNA. In one embodiment, the NES comprises an amino acid sequence at least 70%, at least 71%, at least 72%, at least 73%, at least 74%, at least 75%, at least 76%, at least 77%, at least 78%, at least 79%, at least 80%, at least 81%, at least 82%, at least 83%, at least 84%, at least 85%, at least 86%, at least 87%, at least 88%, at least 89%, at least 90%, at least 91%, at least 92%, at least 93%, at least 94%, at least 95%, at least 96%, at least 97%, at least 98%, or at least 99% identical to SEQ ID NO:75 or 76. In one embodiment, the NES comprises an amino acid sequence of SEQ ID NO: 75 or 76.

[0110] Organelle Localization Signal

[0111] In one embodiment, the protein comprises a localization signal that localizes the protein to an organelle. In one embodiment, the localization signal localizes the protein to the nucleolus, ribosome, vesicle, rough endoplasmic reticulum, Golgi apparatus, cytoskeleton, smooth endoplasmic reticulum, mitochondria, vacuole, cytosol, lysosome, or centriole. A number of localization signals are known in the art.

[0112] In one embodiment, the protein comprises a localization signal that localizes the protein to an organelle or extracellularly. In one embodiment, the localization signal localizes the protein to the nucleolus, ribosome, vesicle, rough endoplasmic reticulum, Golgi apparatus, cytoskeleton, smooth endoplasmic reticulum, mitochondria, vacuole, cytosol, lysosome, or centriole.

[0113] A number of localization signals are known in the art. Exemplary localization signals include, but are not limited to 1× mitochondrial targeting sequence, 4× mitochondrial targeting sequence, secretory signal sequence (IL-2), myristylation, Calsequestrin leader, KDEL retention and peroxisome targeting sequence.

[0114] In one embodiment, the localization signal comprises sequence at least 70%, at least 71%, at least 72%, at least 73%, at least 74%, at least 75%, at least 76%, at least 77%, at least 78%, at least 79%, at least 80%, at least 81%, at least 82%, at least 83%, at least 84%, at least 85%, at least 86%, at least 87%, at least 88%, at least 89%, at least 90%, at least 91%, at least 92%, at least 93%, at least 94%, at least 95%, at least 96%, at least 97%, at least 98%, or at least 99% identical to SEQ ID NO:77-83. In one embodiment, the localization signal comprises sequence of SEQ ID NO: 77-83.

[0115] Purification and/or Detection Tag

[0116] In some embodiments, the protein may contain a purification and/or detection tag. In one embodiment, the tag is on the N-terminal end of the protein. In one embodiment, the tag is a 3×FLAG tag. In one embodiment, the tag comprises an amino acid sequence at least 70%, at least 71%, at least 72%, at least 73%, at least 74%, at least 75%, at least 76%, at least 77%, at least 78%, at least 79%, at least 80%, at least 81%, at least 82%, at least 83%, at least 84%, at least 85%, at least 86%, at least 87%, at least 88%, at least 89%, at least 90%, at least 91%, at least 92%, at least 93%, at least 94%, at least 95%, at least 96%, at least 97%, at least 98%, or at least 99% identical to SEQ ID NO:66. In one embodiment, the tag comprises an amino acid sequence of SEQ ID NO:66.

[0117] EraseR Proteins

[0118] In one embodiment, the proteins of the disclosure are effectively delivered to the nucleus, an organelle, the cytoplasm or extracellularly and allow for targeted RNA cleavage. In one embodiment, the protein comprises an amino acid sequence 70%, at least 71%, at least 72%, at least 73%, at least 74%, at least 75%, at least 76%, at least 77%, at least 78%, at least 79%, at least 80%, at least 81%, at least 82%, at least 83%, at least 84%, at least 85%, at least 86%, at least 87%, at least 88%, at least 89%, at least 90%, at least 91%, at least 92%, at least 93%, at least 94%, at least 95%, at least 96%, at least 97%, at least 98%, or at least 99% identical to one of SEQ ID NOs:150-171. In one embodiment, the protein comprises an amino acid sequence of one of SEQ ID NOs: 150-171.

### HiLightR

[0119] The present disclosure also provides novel fusions of an editing protein and a fluorescent protein. In one embodiment, the fusion protein combines the visualization capability of the fluorescent protein and the programmable DNA targeting capability of catalytically dead Cas. In one embodiment, the fusion protein comprises a nuclear localization signal, to target RNA in the nucleus. In one embodiments, the fusion protein comprises a nuclear export signal (NES), to target RNA in the cytoplasm. In other embodiments, the fusion protein does not comprise an NLS, to target RNA in the cytoplasm. Other localization signals can be used (and which are known in the art) to target RNA in organelles, such as mitochondria. In one embodiment, the fusion protein comprises a linker. In one embodiment, the linker links the Cas protein and fluorescent protein. In one embodiment, the fusion protein comprises a purification and/or detection tag.

[0120] Editing Protein

[0121] In one embodiment, the editing protein includes, but is not limited to, a CRISPR-associated (Cas) protein, a zinc finger nuclease (ZFN) protein, and a protein having a DNA or RNA binding domain.

[0122] Non-limiting examples of Cas proteins include Cas1, Cas1B, Cas2, Cas3, Cas4, Cas5, Cash, Cas7, Cas8, Cas9, Cas10, Csy1, Csy2, Csy3, Cse1, Cse2, Csc1, Csc2, Csa5, Csn2. Csm2, Csm3, Csm4, Csm5, Csm6, Cmr1, Cmr3, Cmr4, Cmr5, Cmr6, Csb1, Csb2, Csb3, Csx17, Csx14, Csx10, Csx16, CsaX, Csx3, Csx1, Csx15, Csf1, Csf2, Csf3, Csf4, SpCas9, StCas9, NmCas9, SaCas9, CjCas9, CjCas9, AsCpf1, LbCpf1, FnCpf1, VRER SpCas9, VQR SpCas9, xCas9 3.7, homologs thereof, orthologs thereof, or modified versions thereof. In some embodiments, the Cas protein has DNA or RNA cleavage activity. In some embodiments, the Cas protein directs cleavage of one or both strands of a nucleic acid molecule at the location of a target sequence, such as within the target sequence and/or within the complement of the target sequence. In some embodiments, the Cas protein directs cleavage of one or both strands within about 1, 2, 3, 4, 5, 6, 7, 8, 9, 10, 15, 20, 25, 50, 100, 200, 500, or more base pairs from the first or last nucleotide of a target sequence. In one embodiment, the Cas protein is Cas9, Cas13, or Cpf1. In one embodiment, Cas protein is catalytically deficient (dCas).

[0123] In one embodiment, the Cas protein has RNA binding activity. In one embodiment, Cas protein is Cas13. In one embodiment, the Cas protein is PspCas13b, PspCas13b Truncation, AdmCas13d, AspCas13b, AspCas13c, BmaCas13a, BzoCas13b, CamCas13a, CcaCas13b, Cga2Cas13a, CgaCas13a, EbaCas13a, EreCas13a, EsCas13d, FbrCas13b, FnbCas13c, FndCas13c, FnfCas13c, FnsCas13c, FpeCas13c, FulCas13c, HheCas13a, LbfCas13a, LbmCas13a, LbnCas13a, LbuCas13a, LseCas13a, LshCas13a, LspCas13a, Lwa2cas13a, LwaCas13a, LweCas13a, PauCas13b, PbuCas13b, PgiCas13b, PguCas13b, Pin2Cas13b, Pin3Cas13b, PinCas13b, Pprcas13a, PsaCas13b, PsmCas13b, RaCas13d, RanCas13b, RcdCas13a, RcrCas13a, RcsCas13a, RfxCas13d, UrCas13d, dPspCas13b, PspCas13b_A133H, PspCas13b_A1058H, dPspCas13b truncation, dAdmCas13d, dAspCas13b, dAspCas13c, dBmaCas13a, dBzoCas13b, dCamCas13a, dCcaCas13b, dCga2Cas13a, dCgaCas13a, dEbaCas13a, dEreCas13a, dEsCas13d, dFbrCas13b, dFnbCas13c, dFndCas13c, dFnfCas13c, dFnsCas13c, dFpeCas13c, dFulCas13c, dHheCas13a, dLbfCas13a, dLbmCas13a, dLbnCas13a, dLbuCas13a, dLseCas13a, dLshCas13a, dLspCas13a, dLwa2cas13a, dLwaCas13a, dLweCas13a, dPauCas13b, dPbuCas13b, dPgiCas13b, dPguCas13b, dPin2Cas13b, dPin3Cas13b, dPinCas13b, dPprCas13a, dPsaCas13b, dPsmCas13b, dRaCas13d, dRanCas13b, dRcdCas13a, dRcrCas13a, dRcsCas13a, dRfxCas13d, or dUrCas13d. Additional Cas proteins are known in the art (e.g., Konermann et al., Cell, 2018, 173:665-676 e14, Yan et al., Mol Cell, 2018, 7:327-339 e5; Cox, D. B. T., et al., Science, 2017, 358: 1019-1027; Abudayyeh et al., Nature, 2017, 550: 280-284, Gootenberg et al., Science, 2017, 356: 438-442; and East-Seletsky et al., Mol Cell, 2017, 66: 373-383 e3, which are herein incorporated by reference).

[0124] In one embodiment, the Cas protein comprises a sequence at least 70%, at least 71%, at least 72%, at least 73%, at least 74%, at least 75%, at least 76%, at least 77%, at least 78%, at least 79%, at least 80%, at least 81%, at least 82%, at least 83%, at least 84%, at least 85%, at least 86%, at least 87%, at least 88%, at least 89%, at least 90%, at least 91%, at least 92%, at least 93%, at least 94%, at least 95%, at least 96%, at least 97%, at least 98%, or at least 99% identical to one of SEQ ID NOs:1-48. In one embodiment, the Cas protein comprises a sequence at least 70%, at least 71%, at least 72%, at least 73%, at least 74%, at least 75%, at least 76%, at least 77%, at least 78%, at least 79%, at least 80%, at least 81%, at least 82%, at least 83%, at least 84%, at least 85%, at least 86%, at least 87%, at least 88%, at least 89%, at least 90%, at least 91%, at least 92%, at least 93%, at least 94%, at least 95%, at least 96%, at least 97%, at least 98%, or at least 99% identical to one of SEQ ID NOs: 1-48. In one embodiment, the Cas protein comprises a sequence of a variant of one of SEQ ID NOs: 1-48, wherein the variant renders the Cas protein catalytically inactive. In one embodiment, the Cas protein comprises a sequence of one of SEQ ID NOs: 1-46 having one or more insertions, deletions or substitutions, wherein the one or more insertions, deletions or substitutions renders the Cas protein catalytically inactive. In one embodiment, the Cas protein comprises a sequence of one of SEQ ID NOs:1-48. In one embodiment, the Cas protein comprises a sequence of one of SEQ ID NOs:47-48.

[0125] Fluorescent Protein

[0126] In one embodiment, the fluorescent protein is eGFP, mCherry, mCherry-MBNL1, sfGFP, sfGFP(1-10), sfGFP(1-10)-L-(11), 7xS11, sfCherry, S11, Emerald, Superfolder GFP, Azami Green, mWasabi, TagGFP, TurboGFP, AcGFP, ZsGreen, T-Sapphire, Blue Fluorescent Proteins, EBFP, EBFP2, Azurite, mTagBFP, Cyan Fluorescent Proteins, eCFP, mECFP, Cerulean, mTurquoise, CyPet, AmCyanl, Midori-Ishi Cyan, TagCFP, mTFP1 (Teal), Yellow Fluorescent Proteins, EYFP, Topaz, Venus, mCitrine, YPet, TagYFP, PhiYFP, ZsYellow1, mBanana, Orange Fluorescent Proteins, Kusabira Orange, Kusabira Orange2, mOrange, mOrange2, dTomato, dTomato-Tandem, TagRFP, TagRFP-T, DsRed, DsRed2, DsRed-Express (T1), DsRed-Monomer, mTangerine, Red Fluorescent Proteins, mRuby, mApple, mStrawberry, AsRed2, mRFP1, JRed, HcRed1, mRaspberry, dKeima-Tandem, HcRed-Tandem, mPlum, or AQ143.

[0127] In one embodiment, the fluorescent protein is eGFP, mCherry, sfGFP, sfGFP(1-10), sfGFP(1-10)-L-(11), sfCherry, or 7xS11. In one embodiment, the fluorescent protein comprises an amino acid sequence at least 70%, at least 71%, at least 72%, at least 73%, at least 74%, at least 75%, at least 76%, at least 77%, at least 78%, at least 79%, at least 80%, at least 81%, at least 82%, at least 83%, at least 84%, at least 85%, at least 86%, at least 87%, at least 88%, at least 89%, at least 90%, at least 91%, at least 92%, at least 93%, at least 94%, at least 95%, at least 96%, at least 97%, at least 98%, or at least 99% identical to one of SEQ ID NOs:49-56. In one embodiment, the fluorescent protein comprises an amino acid sequence of one of SEQ ID NOs: 49-56.

[0128] Localization Signal

[0129] In some embodiments, the protein may contain a localization signal, such as an nuclear localization signal (NLS), nuclear export signal (NES) or other localization signals to localize to organelles, such as mitochondria, or to localize in the cytoplasm. In one embodiment, the localization signal localizes the protein to the site in which a target RNA is located.

[0130] Nuclear Localization Signal

[0131] In one embodiment, the fusion protein comprises a NLS. In one embodiment, the NLS is a retrotransposon NLS. In one embodiment, the NLS is derived from Ty1, yeast GAL4, SKI3, L29 or histone H2B proteins, polyoma virus large T protein, VP1 or VP2 capsid protein, SV40 VP1 or VP2 capsid protein, Adenovirus E1 a or DBP protein, influenza virus NS1 protein, hepatitis vims core antigen or the mammalian lamin, c-myc, max, c-myb, p53, c-erbA, jun, Tax, steroid receptor or Mx proteins, Nucleoplasmin (NPM2), Nucleophosmin (NPM1), or simian vims 40 (“SV40”) T-antigen. In one embodiment, the NLS is a Ty1 or Ty1-derived NLS, a Ty2 or Ty2-derived NLS or a MAK11 or MAK11-derived NLS. In one embodiment, the Ty1 NLS comprises an amino acid sequence of SEQ ID NO:67. In one embodiment, the Ty2 NLS comprises an amino acid sequence of SEQ ID NO:68. In one embodiment, the MAK11 NLS comprises an amino acid sequence of SEQ ID NO:69. In one embodiment, the NLS comprises a sequence at least 70%, at least 71%, at least 72%, at least 73%, at least 74%, at least 75%, at least 76%, at least 77%, at least 78%, at least 79%, at least 80%, at least 81%, at least 82%, at least 83%, at least 84%, at least 85%, at least 86%, at least 87%, at least 88%, at least 89%, at least 90%, at least 91%, at least 92%, at least 93%, at least 94%, at least 95%, at least 96%, at least 97%, at least 98%, or at least 99% identical to one of SEQ ID NOs: 67-74 and 427-1039. In one embodiment, the NLS comprises a sequence of one of SEQ ID NOs: 67-74 and 427-1039.

[0132] In one embodiment, the NLS is a Ty1-like NLS. For example, in one embodiment, the Ty1-like NLS comprises KKRX motif. In one embodiment, the Ty1-like NLS comprises KKRX motif at the N-terminal end. In one embodiment, the Ty1-like NLS comprises KKR motif. In one embodiment, the Ty1-like NLS comprises KKR motif at the C-terminal end. In one embodiment, the Ty1-like NLS comprises a KKRX and a KKR motif. In one embodiment, the Ty1-like NLS comprises a KKRX at the N-terminal end and a KKR motif at the C-terminal end. In one embodiment, the Ty1-like NLS comprises at least 20 amino acids. In one embodiment, the Ty1-like NLS comprises between 20 and 40 amino acids. In one embodiment, the Ty1-like NLS comprises a sequence at least 70%, at least 71%, at least 72%, at least 73%, at least 74%, at least 75%, at least 76%, at least 77%, at least 78%, at least 79%, at least 80%, at least 81%, at least 82%, at least 83%, at least 84%, at least 85%, at least 86%, at least 87%, at least 88%, at least 89%, at least 90%, at least 91%, at least 92%, at least 93%, at least 94%, at least 95%, at least 96%, at least 97%, at least 98%, or at least 99% identical to one of SEQ ID NOs: 427-1039. In one embodiment, the NLS comprises a sequence of one of SEQ ID NOs: 427-1039, wherein the sequence comprises one or more, two or more, three or more, four or more, five or more, six or more, seven or more, eight or more, nine or more, or ten or more, insertions, deletions or substitutions. In one embodiment, the Ty1-like NLS comprises a sequence of one of SEQ ID NOs: 427-1039.

[0133] In one embodiment, the NLS comprises two copies of the same NLS. For example, in one embodiment, the NLS comprises a multimer of a first Ty1-derived NLS and a second Ty1-derived NLS.

[0134] Nuclear Export Signal

[0135] In one embodiment, the fusion protein comprises a Nuclear Export Signal (NES). In one embodiment, the NES is attached to the N-terminal end of the Cas protein. In one embodiment, the NES localizes the fusion protein to the cytoplasm for targeting cytoplasmic RNA. In one embodiment, the NES comprises an amino acid sequence at least 70%, at least 71%, at least 72%, at least 73%, at least 74%, at least 75%, at least 76%, at least 77%, at least 78%, at least 79%, at least 80%, at least 81%, at least 82%, at least 83%, at least 84%, at least 85%, at least 86%, at least 87%, at least 88%, at least 89%, at least 90%, at least 91%, at least 92%, at least 93%, at least 94%, at least 95%, at least 96%, at least 97%, at least 98%, or at least 99% identical to SEQ ID NO:75 or 76. In one embodiment, the NES comprises an amino acid sequence of SEQ ID NO: 75 or 76.

[0136] Organelle Localization Signal

[0137] In one embodiment, the fusion protein comprises a localization signal that localizes the fusion protein to an organelle. In one embodiment, the localization signal localizes the protein to the nucleolus, ribosome, vesicle, rough endoplasmic reticulum, Golgi apparatus, cytoskeleton, smooth endoplasmic reticulum, mitochondria, vacuole, cytosol, lysosome, or centriole. A number of localization signals are known in the art.

[0138] In one embodiment, the fusion protein comprises a localization signal that localizes the fusion protein to an organelle or extracellularly. In one embodiment, the localization signal localizes the protein to the nucleolus, ribosome, vesicle, rough endoplasmic reticulum, Golgi apparatus, cytoskeleton, smooth endoplasmic reticulum, mitochondria, vacuole, cytosol, lysosome, or centriole.

[0139] A number of localization signals are known in the art. Exemplary localization signals include, but are not limited to 1× mitochondrial targeting sequence, 4× mitochondrial targeting sequence, secretory signal sequence (IL-2), myristylation, Calsequestrin leader, KDEL retention and peroxisome targeting sequence.

[0140] In one embodiment, the localization signal comprises sequence at least 70%, at least 71%, at least 72%, at least 73%, at least 74%, at least 75%, at least 76%, at least 77%, at least 78%, at least 79%, at least 80%, at least 81%, at least 82%, at least 83%, at least 84%, at least 85%, at least 86%, at least 87%, at least 88%, at least 89%, at least 90%, at least 91%, at least 92%, at least 93%, at least 94%, at least 95%, at least 96%, at least 97%, at least 98%, or at least 99% identical to SEQ ID NO:77-83. In one embodiment, the localization signal comprises sequence of SEQ ID NO: 77-83.

[0141] Linker

[0142] In one embodiment, the protein comprises a linker peptide. In one embodiment, the linker peptide links the Cas protein and fluorescent protein. In one embodiment, the linker peptide is connected to the C-terminal end of the Cas protein and to the N-terminal end of the fluorescent protein. In one embodiment, the linker is connected to the N-terminal end of the Cas protein and to the C-terminal end of the fluorescent protein.

[0143] In one embodiment, linker peptide comprises an amino acid sequence at least 70%, at least 71%, at least 72%, at least 73%, at least 74%, at least 75%, at least 76%, at least 77%, at least 78%, at least 79%, at least 80%, at least 81%, at least 82%, at least 83%, at least 84%, at least 85%, at least 86%, at least 87%, at least 88%, at least 89%, at least 90%, at least 91%, at least 92%, at least 93%, at least 94%, at least 95%, at least 96%, at least 97%, at least 98%, or at least 99% identical to one of SEQ ID NOs:57-65. In one embodiment, linker peptide comprises an amino acid sequence of one of SEQ ID NOs: 57-65.

[0144] Purification and/or Detection Tag

[0145] In some embodiments, the protein may contain a purification and/or detection tag. In one embodiment, the tag is on the N-terminal end of the protein. In one embodiment, the tag is a 3×FLAG tag. In one embodiment, the tag comprises an amino acid sequence at least 70%, at least 71%, at least 72%, at least 73%, at least 74%, at least 75%, at least 76%, at least 77%, at least 78%, at least 79%, at least 80%, at least 81%, at least 82%, at least 83%, at least 84%, at least 85%, at least 86%, at least 87%, at least 88%, at least 89%, at least 90%, at least 91%, at least 92%, at least 93%, at least 94%, at least 95%, at least 96%, at least 97%, at least 98%, or at least 99% identical to SEQ ID NO:66. In one embodiment, the tag comprises an amino acid sequence of SEQ ID NO:66.

[0146] HilightR Fusion Proteins

[0147] In one embodiment, the fusion protein combines the visualization capability of the fluorescent protein and the programmable DNA targeting capability of catalytically dead Cas. Thus, in one embodiment, the fusion protein of the disclosure provide for visualization of In one embodiment, the fusion protein comprises an amino acid sequence 70%, at least 71%, at least 72%, at least 73%, at least 74%, at least 75%, at least 76%, at least 77%, at least 78%, at least 79%, at least 80%, at least 81%, at least 82%, at least 83%, at least 84%, at least 85%, at least 86%, at least 87%, at least 88%, at least 89%, at least 90%, at least 91%, at least 92%, at least 93%, at least 94%, at least 95%, at least 96%, at least 97%, at least 98%, or at least 99% identical to one of SEQ ID NOs:84-149. In one embodiment, the fusion protein comprises an amino acid sequence of one of SEQ ID NOs: 84-149.

### Proteins, Peptides and Fusion Proteins

[0148] The proteins of the present disclosure may be made using chemical methods. For example, protein can be synthesized by solid phase techniques (Roberge J Y et al (1995) Science 269: 202-204), cleaved from the resin, and purified by preparative high-performance liquid chromatography. Automated synthesis may be achieved, for example, using the ABI 431 A Peptide Synthesizer (Perkin Elmer) in accordance with the instructions provided by the manufacturer.

[0149] The proteins of the present disclosure may be made using recombinant protein expression. The recombinant expression vectors of the disclosure comprise a nucleic acid of the invention in a form suitable for expression of the nucleic acid in a host cell, which means that the recombinant expression vectors include one or more regulatory sequences, selected on the basis of the host cells to be used for expression, that is operatively-linked to the nucleic acid sequence to be expressed. Within a recombinant expression vector, “operably-linked” is intended to mean that the nucleotide sequence of interest is linked to the regulatory sequences in a manner that allows for expression of the nucleotide sequence (e.g., in an in vitro transcription/translation system or in a host cell when the vector is introduced into the host cell).

[0150] The term “regulatory sequence” is intended to include promoters, enhancers and other expression control elements (e.g., polyadenylation signals). Such regulatory sequences are described, for example, in Goeddel, Gene Expression Technology: Methods in Enzymology 185, Academic Press, San Diego, Calif. (1990). Regulatory sequences include those that direct constitutive expression of a nucleotide sequence in many types of host cell and those that direct expression of the nucleotide sequence only in certain host cells (e.g., tissue-specific regulatory sequences). It will be appreciated by those skilled in the art that the design of the expression vector can depend on such factors as the choice of the host cell to be transformed, the level of expression of protein desired, etc. The expression vectors of the invention can be introduced into host cells to thereby produce proteins or peptides, including fusion proteins or peptides, encoded by nucleic acids as described herein.

[0151] The recombinant expression vectors of the invention can be designed for production of variant proteins in prokaryotic or eukaryotic cells. For example, proteins of the invention can be expressed in bacterial cells such as Escherichia coli, insect cells (using baculovirus expression vectors) yeast cells or mammalian cells. Suitable host cells are discussed further in Goeddel, Gene Expression Technology: Methods in Enzymology 185, Academic Press, San Diego, Calif. (1990). Alternatively, the recombinant expression vector can be transcribed and translated in vitro, for example using T7 promoter regulatory sequences and T7 polymerase.

[0152] Expression of proteins in prokaryotes is most often carried out in Escherichia coli with vectors containing constitutive or inducible promoters directing the expression of either fusion or non-fusion proteins. Fusion vectors add a number of amino acids to a protein encoded therein, to the amino or C terminus of the recombinant protein. Such fusion vectors typically serve three purposes: (i) to increase expression of recombinant protein; (ii) to increase the solubility of the recombinant protein; and (iii) to aid in the purification of the recombinant protein by acting as a ligand in affinity purification. Often, in fusion expression vectors, a proteolytic cleavage site is introduced at the junction of the fusion moiety and the recombinant protein to enable separation of the recombinant protein from the fusion moiety subsequent to purification of the fusion protein. Such enzymes, and their cognate recognition sequences, include Factor Xa, thrombin, PreScission, TEV and enterokinase. Typical fusion expression vectors include pGEX (Pharmacia Biotech Inc; Smith and Johnson, 1988. Gene 67: 31-40), pMAL (New England Biolabs, Beverly, Mass.) and pRITS (Pharmacia, Piscataway, N.J.) that fuse glutathione S-transferase (GST), maltose E binding protein, or protein A, respectively, to the target recombinant protein.

[0153] Examples of suitable inducible non-fusion E. coli expression vectors include pTrc (Amrann et al., (1988) Gene 69:301-315) and pET 11d (Studier et al., Gene Expression Technology: Methods in Enzymology 185, Academic Press, San Diego, Calif. (1990) 60-89)—not accurate, pET11a-d have N terminal T7 tag.

[0154] One strategy to maximize recombinant protein expression in E. coli is to express the protein in a host bacterium with an impaired capacity to proteolytically cleave the recombinant protein. See, e.g., Gottesman, Gene Expression Technology: Methods in Enzymology 185, Academic Press, San Diego, Calif. (1990) 119-128. Another strategy is to alter the nucleic acid sequence of the nucleic acid to be inserted into an expression vector so that the individual codons for each amino acid are those preferentially utilized in E. coli (see, e.g., Wada, et al., 1992. Nucl. Acids Res. 20: 2111-2118). Such alteration of nucleic acid sequences of the invention can be carried out by standard DNA synthesis techniques. Another strategy to solve codon bias is by using BL21-codon plus bacterial strains (Invitrogen) or Rosetta bacterial strain (Novagen), these strains contain extra copies of rare E. coli tRNA genes.

[0155] In another embodiment, the expression vector encoding for the protein of the disclosure is a yeast expression vector. Examples of vectors for expression in yeast Saccharomyces cerevisiae include pYepSec1 (Baldari, et al., 1987. EMBO J. 6: 229-234), pMFa (Kurjan and Herskowitz, 1982. Cell 30: 933-943), pJRY88 (Schultz et al., 1987. Gene 54: 113-123), pYES2 (Invitrogen Corporation, San Diego, Calif.), and picZ (InVitrogen Corp, San Diego, Calif.).

[0156] Alternatively, polypeptides of the present invention can be produced in insect cells using baculovirus expression vectors. Baculovirus vectors available for expression of proteins in cultured insect cells (e.g., SF9 cells) include the pAc series (Smith, et al., 1983. Mol. Cell. Biol. 3: 2156-2165) and the pVL series (Lucklow and Summers, 1989. Virology 170: 31-39).

[0157] In yet another embodiment, a nucleic acid of the disclosure is expressed in mammalian cells using a mammalian expression vector. Mammalian cell lines available in the art for expression of a heterologous polypeptide include, but are not limited to, Chinese hamster ovary (CHO) cells, HeLa cells, baby hamster kidney cells, NSO mouse melanoma cells, YB2/0 rat myeloma cells, human embryonic kidney cells, human embryonic retina cells and many others. Examples of mammalian expression vectors include pCDM8 (Seed, 1987. Nature 329: 840) and pMT2PC (Kaufman, et al., 1987. EMBO J. 6: 187-195), pIRESpuro (Clontech), pUB6 (Invitrogen), pCEP4 (Invitrogen) pREP4 (Invitrogen), pcDNA3 (Invitrogen). When used in mammalian cells, the expression vector's control functions are often provided by viral regulatory elements. For example, commonly used promoters are derived from polyoma, adenovirus 2, cytomegalovirus, Rous Sarcoma Virus, and simian virus 40. For other suitable expression systems for both prokaryotic and eukaryotic cells see, e.g., Chapters 16 and 17 of Sambrook, et al., Molecular Cloning: A Laboratory Manual. 2nd ed., Cold Spring Harbor Laboratory, Cold Spring Harbor Laboratory Press, Cold Spring Harbor, N.Y., 1989.

[0158] In another embodiment, the recombinant mammalian expression vector is capable of directing expression of the nucleic acid preferentially in a particular cell type (e.g., tissue-specific regulatory elements are used to express the nucleic acid). Tissue-specific regulatory elements are known in the art. Non-limiting examples of suitable tissue-specific promoters include the albumin promoter (liver-specific; Pinkert, et al., 1987. Genes Dev. 1: 268-277), lymphoid-specific promoters (Calame and Eaton, 1988. Adv. Immunol. 43: 235-275), in particular promoters of T cell receptors (Winoto and Baltimore, 1989. EMBO J. 8: 729-733) and immunoglobulins (Banerji, et al., 1983. Cell 33: 729-740; Queen and Baltimore, 1983. Cell 33: 741-748), neuron-specific promoters (e.g., the neurofilament promoter; Byrne and Ruddle, 1989. Proc. Natl. Acad. Sci. USA 86: 5473-5477), pancreas-specific promoters (Edlund, et al., 1985. Science 230: 912-916), and mammary gland-specific promoters (e.g., milk whey promoter; U.S. Pat. No. 4,873,316 and European Application Publication No. 264,166). Developmentally-regulated promoters are also encompassed, e.g., the murinehox promoters (Kessel and Gruss, 1990. Science 249: 374-379) and the alpha-fetoprotein promoter (Campes and Tilghman, 1989. Genes Dev. 3: 537-546).

[0159] The invention should also be construed to include any form of a protein having substantial homology to a protein disclosed herein. In one embodiment, a protein which is “substantially homologous” is about 50% homologous, about 70% homologous, about 80% homologous, about 90% homologous, about 91% homologous, about 92% homologous, about 93% homologous, about 94% homologous, about 95% homologous, about 96% homologous, about 97% homologous, about 98% homologous, or about 99% homologous to amino acid sequence of a fusion-protein disclosed herein.

[0160] The protein may alternatively be made by recombinant means or by cleavage from a longer polypeptide. The composition of a protein may be confirmed by amino acid analysis or sequencing.

[0161] The variants of the protein according to the present invention may be (i) one in which one or more of the amino acid residues are substituted with a conserved or non-conserved amino acid residue and such substituted amino acid residue may or may not be one encoded by the genetic code, (ii) one in which there are one or more modified amino acid residues, e.g., residues that are modified by the attachment of substituent groups, (iii) one in which the peptide is an alternative splice variant of the protein of the present invention, (iv) fragments of the peptides and/or (v) one in which the protein is fused with another peptide, such as a leader or secretory sequence or a sequence which is employed for purification (for example, His-tag) or for detection (for example, Sv5 epitope tag). The fragments include peptides generated via proteolytic cleavage (including multi-site proteolysis) of an original sequence. Variants may be post-translationally, or chemically modified. Such variants are deemed to be within the scope of those skilled in the art from the teaching herein.

[0162] As known in the art the “similarity” between two fusion proteins is determined by comparing the amino acid sequence and its conserved amino acid substitutes of one polypeptide to a sequence of a second polypeptide. Variants are defined to include peptide sequences different from the original sequence. In one embodiment, variants are different from the original sequence in less than 40% of residues per segment of interest different from the original sequence in less than 25% of residues per segment of interest, different by less than 10% of residues per segment of interest, or different from the original protein sequence in just a few residues per segment of interest and at the same time sufficiently homologous to the original sequence to preserve the functionality of the original sequence and/or the ability to stimulate the differentiation of a stem cell into the osteoblast lineage. The present invention includes amino acid sequences that are at least 60%, 65%, 70%, 72%, 74%, 76%, 78%, 80%, 90%, 91%, 92%, 93%, 94%, 95%, 96%, 97%, 98%, or 99% similar or identical to the original amino acid sequence. The degree of identity between two peptides is determined using computer algorithms and methods that are widely known for the persons skilled in the art. The identity between two amino acid sequences may be determined by using the BLASTP algorithm [BLAST Manual, Altschul, S., et al., NCBI NLM NIH Bethesda, Md. 20894, Altschul, S., et al., J. Mol. Biol. 215: 403-410 (1990)].

[0163] The protein of the disclosure can be post-translationally modified. For example, post-translational modifications that fall within the scope of the present invention include signal peptide cleavage, glycosylation, acetylation, isoprenylation, proteolysis, myristoylation, protein folding and proteolytic processing, etc. Some modifications or processing events require introduction of additional biological machinery. For example, processing events, such as signal peptide cleavage and core glycosylation, are examined by adding canine microsomal membranes or Xenopus egg extracts (U.S. Pat. No. 6,103,489) to a standard translation reaction.

[0164] The protein of the disclosure may include unnatural amino acids formed by post-translational modification or by introducing unnatural amino acids during translation. A variety of approaches are available for introducing unnatural amino acids during protein translation.

[0165] A protein of the disclosure may be phosphorylated using conventional methods such as the method described in Reedijk et al. (The EMBO Journal 11(4):1365, 1992).

[0166] Cyclic derivatives of the fusion proteins of the invention are also part of the present invention. Cyclization may allow the protein to assume a more favorable conformation for association with other molecules. Cyclization may be achieved using techniques known in the art. For example, disulfide bonds may be formed between two appropriately spaced components having free sulfhydryl groups, or an amide bond may be formed between an amino group of one component and a carboxyl group of another component. Cyclization may also be achieved using an azobenzene-containing amino acid as described by Ulysse, L., et al., J. Am. Chem. Soc. 1995, 117, 8466-8467. The components that form the bonds may be side chains of amino acids, non-amino acid components or a combination of the two. In an embodiment of the invention, cyclic peptides may comprise a beta-turn in the right position. Beta-turns may be introduced into the peptides of the invention by adding the amino acids Pro-Gly at the right position.

[0167] It may be desirable to produce a cyclic protein which is more flexible than the cyclic peptides containing peptide bond linkages as described above. A more flexible peptide may be prepared by introducing cysteines at the right and left position of the peptide and forming a disulfide bridge between the two cysteines. The two cysteines are arranged so as not to deform the beta-sheet and turn. The peptide is more flexible as a result of the length of the disulfide linkage and the smaller number of hydrogen bonds in the beta-sheet portion. The relative flexibility of a cyclic peptide can be determined by molecular dynamics simulations.

[0168] The invention also relates to peptides comprising a fusion protein comprising Cas13 and a RNase protein, wherein the fusion protein is itself fused to, or integrated into, a target protein, and/or a targeting domain capable of directing the chimeric protein to a desired cellular component or cell type or tissue. The chimeric proteins may also contain additional amino acid sequences or domains. The chimeric proteins are recombinant in the sense that the various components are from different sources, and as such are not found together in nature (i.e., are heterologous).

[0169] In one embodiment, the targeting domain can be a membrane spanning domain, a membrane binding domain, or a sequence directing the protein to associate with for example vesicles or with the nucleus. In one embodiment, the targeting domain can target a peptide to a particular cell type or tissue. For example, the targeting domain can be a cell surface ligand or an antibody against cell surface antigens of a target tissue. A targeting domain may target the peptide of the invention to a cellular component.

[0170] A peptide of the invention may be synthesized by conventional techniques. For example, the peptides or chimeric proteins may be synthesized by chemical synthesis using solid phase peptide synthesis. These methods employ either solid or solution phase synthesis methods (see for example, J. M. Stewart, and J. D. Young, Solid Phase Peptide Synthesis, 2^{nd} Ed., Pierce Chemical Co., Rockford Ill. (1984) and G. Barany and R. B. Merrifield, The Peptides: Analysis Synthesis, Biology editors E. Gross and J. Meienhofer Vol. 2 Academic Press, New York, 1980, pp. 3-254 for solid phase synthesis techniques; and M Bodansky, Principles of Peptide Synthesis, Springer-Verlag, Berlin 1984, and E. Gross and J. Meienhofer, Eds., The Peptides: Analysis, Synthesis, Biology, suprs, Vol 1, for classical solution synthesis). By way of example, a peptide of the invention may be synthesized using 9-fluorenyl methoxycarbonyl (Fmoc) solid phase chemistry with direct incorporation of phosphothreonine as the N-fluorenylmethoxy-carbonyl-O-benzyl-L-phosphothreonine derivative.

[0171] N-terminal or C-terminal fusion proteins comprising a peptide or chimeric protein of the invention conjugated with other molecules may be prepared by fusing, through recombinant techniques, the N-terminal or C-terminal of the peptide or chimeric protein, and the sequence of a selected protein or selectable marker with a desired biological function. The resultant fusion proteins contain the protein fused to the selected protein or marker protein as described herein. Examples of proteins which may be used to prepare fusion proteins include immunoglobulins, glutathione-S-transferase (GST), hemagglutinin (HA), and truncated myc.

[0172] Peptides of the invention may be developed using a biological expression system. The use of these systems allows the production of large libraries of random peptide sequences and the screening of these libraries for peptide sequences that bind to particular proteins. Libraries may be produced by cloning synthetic DNA that encodes random peptide sequences into appropriate expression vectors (see Christian et al 1992, J. Mol. Biol. 227:711; Devlin et al, 1990 Science 249:404; Cwirla et al 1990, Proc. Natl. Acad, Sci. USA, 87:6378). Libraries may also be constructed by concurrent synthesis of overlapping peptides (see U.S. Pat. No. 4,708,871).

[0173] The peptides and chimeric proteins of the invention may be converted into pharmaceutical salts by reacting with inorganic acids such as hydrochloric acid, sulfuric acid, hydrobromic acid, phosphoric acid, etc., or organic acids such as formic acid, acetic acid, propionic acid, glycolic acid, lactic acid, pyruvic acid, oxalic acid, succinic acid, malic acid, tartaric acid, citric acid, benzoic acid, salicylic acid, benzenesulfonic acid, and toluenesulfonic acids.

### Nucleic Acids

[0174] In one aspect, the present disclosure novel nucleic acid molecules encoding editing proteins which provide targeted RNA cleavage. In some embodiment, the nucleic acid molecule comprises a nucleic acid sequence encoding a localization signal. In one embodiment, the localization signal localizes the protein to the site in which a target RNA is located. In one embodiment, the nucleic acid molecule comprises a nucleic acid sequence encoding a nuclear localization signal (NLS), to target RNA in the nucleus. In one embodiment, the nucleic acid molecule comprises a nucleic acid sequence encoding a nuclear export signal (NES), to target RNA in the cytoplasm. Other localization signals can be used (and which are known in the art) to target RNA in organelles, such as mitochondria. In other embodiments, the nucleic acid molecule does not comprise a nucleic acid sequence encoding an localization signal, to target RNA in the cytoplasm. In one embodiment, the nucleic acid molecule comprises a nucleic acid sequence encoding a purification and/or detection tag.

[0175] The present disclosure also provides novel nucleic acid molecules encoding fusions of an editing protein and a fluorescent protein. In one embodiment, the fusion protein combines the visualization capability of the fluorescent protein and the programmable DNA targeting capability of catalytically dead Cas. In one embodiment, the nucleic acid molecule comprises a nucleic acid sequence encoding a nuclear localization signal, to target RNA in the nucleus. In one embodiments, the nucleic acid molecule comprises a nucleic acid sequence encoding an nuclear export signal (NES), to target RNA in the cytoplasm. In other embodiments, the nucleic acid molecule does not comprise a nucleic acid sequence encoding localization signal, to target RNA in the cytoplasm. Other localization signals can be used (and which are known in the art) to target RNA in organelles, such as mitochondria. In one embodiment, the nucleic acid molecule comprises a nucleic acid sequence encoding a linker. In one embodiment, the linker links the Cas protein and fluorescent protein. In one embodiment, the nucleic acid molecule comprises a nucleic acid sequence encoding a purification and/or detection tag.

[0176] The present disclosure also provides targeting nucleic acids, including CRISPR RNAs (crRNAs), for targeting the protein of the disclosure to a target RNA.

### EraseR

[0177] In one aspect, the present disclosure novel nucleic acid molecules encoding editing proteins which provide targeted RNA cleavage. In some embodiment, the nucleic acid molecule comprises a nucleic acid sequence encoding a localization signal. In one embodiment, the localization signal localizes the protein to the site in which a target RNA is located. Thus, the disclosure provides nucleic acid molecules encoding proteins for targeted RNA cleavage which are capable of localization.

[0178] Editing Protein

[0179] In one embodiment, the nucleic acid molecule comprises a sequence nucleic acid encoding an editing protein. In one embodiment, the editing protein includes, but is not limited to, a CRISPR-associated (Cas) protein, a zinc finger nuclease (ZFN) protein, and a protein having a DNA or RNA binding domain.

[0180] Non-limiting examples of Cas proteins include Cas1, Cas1B, Cas2, Cas3, Cas4, Cas5, Cash, Cas7, Cas8, Cas9, Cas10, Csy1, Csy2, Csy3, Cse1, Cse2, Csc1, Csc2, Csa5, Csn2. Csm2, Csm3, Csm4, Csm5, Csm6, Cmr1, Cmr3, Cmr4, Cmr5, Cmr6, Csb1, Csb2, Csb3, Csx17, Csx14, Csx10, Csx16, CsaX, Csx3, Csx1, Csx15, Csf1, Csf2, Csf3, Csf4, SpCas9, StCas9, NmCas9, SaCas9, CjCas9, CjCas9, AsCpf1, LbCpf1, FnCpf1, VRER SpCas9, VQR SpCas9, xCas9 3.7, homologs thereof, orthologs thereof, or modified versions thereof. In some embodiments, the Cas protein has DNA or RNA cleavage activity. In some embodiments, the Cas protein directs cleavage of one or both strands of a nucleic acid molecule at the location of a target sequence, such as within the target sequence and/or within the complement of the target sequence. In some embodiments, the Cas protein directs cleavage of one or both strands within about 1, 2, 3, 4, 5, 6, 7, 8, 9, 10, 15, 20, 25, 50, 100, 200, 500, or more base pairs from the first or last nucleotide of a target sequence. In one embodiment, the Cas protein is Cas9, Cas13, or Cpf1. In one embodiment, Cas protein is catalytically deficient (dCas).

[0181] In one embodiment, the Cas protein has RNA binding activity. In one embodiment, Cas protein is Cas13. In one embodiment, the Cas protein is PspCas13b, PspCas13b Truncation, AdmCas13d, AspCas13b, AspCas13c, BmaCas13a, BzoCas13b, CamCas13a, CcaCas13b, Cga2Cas13a, CgaCas13a, EbaCas13a, EreCas13a, EsCas13d, FbrCas13b, FnbCas13c, FndCas13c, FnfCas13c, FnsCas13c, FpeCas13c, FulCas13c, HheCas13a, LbfCas13a, LbmCas13a, LbnCas13a, LbuCas13a, LseCas13a, LshCas13a, LspCas13a, Lwa2cas13a, LwaCas13a, LweCas13a, PauCas13b, PbuCas13b, PgiCas13b, PguCas13b, Pin2Cas13b, Pin3Cas13b, PinCas13b, Pprcas13a, PsaCas13b, PsmCas13b, RaCas13d, RanCas13b, RcdCas13a, RcrCas13a, RcsCas13a, RfxCas13d, UrCas13d, dPspCas13b, PspCas13b_A133H, PspCas13b_A1058H, dPspCas13b truncation, dAdmCas13d, dAspCas13b, dAspCas13c, dBmaCas13a, dBzoCas13b, dCamCas13a, dCcaCas13b, dCga2Cas13a, dCgaCas13a, dEbaCas13a, dEreCas13a, dEsCas13d, dFbrCas13b, dFnbCas13c, dFndCas13c, dFnfCas13c, dFnsCas13c, dFpeCas13c, dFulCas13c, dHheCas13a, dLbfCas13a, dLbmCas13a, dLbnCas13a, dLbuCas13a, dLseCas13a, dLshCas13a, dLspCas13a, dLwa2cas13a, dLwaCas13a, dLweCas13a, dPauCas13b, dPbuCas13b, dPgiCas13b, dPguCas13b, dPin2Cas13b, dPin3Cas13b, dPinCas13b, dPprCas13a, dPsaCas13b, dPsmCas13b, dRaCas13d, dRanCas13b, dRcdCas13a, dRcrCas13a, dRcsCas13a, dRfxCas13d, or dUrCas13d. Additional Cas proteins are known in the art (e.g., Konermann et al., Cell, 2018, 173:665-676 e14, Yan et al., Mol Cell, 2018, 7:327-339 e5; Cox, D. B. T., et al., Science, 2017, 358: 1019-1027; Abudayyeh et al., Nature, 2017, 550: 280-284, Gootenberg et al., Science, 2017, 356: 438-442; and East-Seletsky et al., Mol Cell, 2017, 66: 373-383 e3, which are herein incorporated by reference).

[0182] In one embodiment, the nucleic acid sequence encoding a Cas protein comprises a nucleic acid sequence encoding an amino acid sequence at least 70%, at least 71%, at least 72%, at least 73%, at least 74%, at least 75%, at least 76%, at least 77%, at least 78%, at least 79%, at least 80%, at least 81%, at least 82%, at least 83%, at least 84%, at least 85%, at least 86%, at least 87%, at least 88%, at least 89%, at least 90%, at least 91%, at least 92%, at least 93%, at least 94%, at least 95%, at least 96%, at least 97%, at least 98%, or at least 99% identical to one of SEQ ID NOs: 1-48. In one embodiment, the nucleic acid sequence encoding a Cas protein comprises a nucleic acid sequence encoding an amino acid sequence of one of SEQ ID NOs:1-48. In one embodiment, the nucleic acid sequence encoding a Cas protein comprises a nucleic acid sequence encoding an amino acid sequence of one of SEQ ID NOs:1-46.

[0183] In one embodiment, the nucleic acid sequence encoding a Cas protein comprises a nucleic acid sequence at least 70%, at least 71%, at least 72%, at least 73%, at least 74%, at least 75%, at least 76%, at least 77%, at least 78%, at least 79%, at least 80%, at least 81%, at least 82%, at least 83%, at least 84%, at least 85%, at least 86%, at least 87%, at least 88%, at least 89%, at least 90%, at least 91%, at least 92%, at least 93%, at least 94%, at least 95%, at least 96%, at least 97%, at least 98%, or at least 99% identical to one of SEQ ID NOs: 188-191. In one embodiment, the nucleic acid sequence encoding a Cas protein comprises a nucleic acid sequence of one of SEQ ID NOs: 188-191. In one embodiment, the nucleic acid sequence encoding a Cas protein comprises a nucleic acid sequence of one of SEQ ID NOs:188-190.

[0184] Localization Signal

[0185] In some embodiments, the nucleic acid molecule comprises a nucleic acid sequence encoding a localization signal, such as a nuclear localization signal (NLS), nuclear export signal (NES) or other localization signals to localize to the cytoplasm or to organelles, such as mitochondria. In one embodiment, the localization signal localizes the protein to the site in which the target RNA is located.

[0186] Nuclear Localization Signal

[0187] In one embodiment, the nucleic acid molecule comprises a nucleic acid sequence encoding a nuclear localization signal (NLS). In one embodiment, the NLS is a retrotransposon NLS. In one embodiment, the NLS is derived from Ty1, yeast GAL4, SKI3, L29 or histone H2B proteins, polyoma virus large T protein, VP1 or VP2 capsid protein, SV40 VP1 or VP2 capsid protein, Adenovirus E1 a or DBP protein, influenza virus NS1 protein, hepatitis vims core antigen or the mammalian lamin, c-myc, max, c-myb, p53, c-erbA, jun, Tax, steroid receptor or Mx proteins, Nucleoplasmin (NPM2), Nucleophosmin (NPM1), or simian vims 40 (“SV40”) T-antigen.

[0188] In one embodiment, the NLS is a Ty1 or Ty1-derived NLS, a Ty2 or Ty2-derived NLS or a MAK11 or MAK11-derived NLS. In one embodiment, the Ty1 NLS comprises an amino acid sequence of SEQ ID NO:67. In one embodiment, the Ty2 NLS comprises an amino acid sequence of SEQ ID NO:68. In one embodiment, the MAK11 NLS comprises an amino acid sequence of SEQ ID NO:69. In one embodiment, the nucleic acid sequence encoding a NLS comprises a nucleic acid sequence encoding an amino acid sequence at least 70%, at least 71%, at least 72%, at least 73%, at least 74%, at least 75%, at least 76%, at least 77%, at least 78%, at least 79%, at least 80%, at least 81%, at least 82%, at least 83%, at least 84%, at least 85%, at least 86%, at least 87%, at least 88%, at least 89%, at least 90%, at least 91%, at least 92%, at least 93%, at least 94%, at least 95%, at least 96%, at least 97%, at least 98%, or at least 99% identical to one of SEQ ID NOs: 67-74 and 427-1039. In one embodiment, the nucleic acid sequence encoding a NLS comprises a nucleic acid sequence encoding an amino acid sequence of one of SEQ ID NOs: 67-74 and 427-1039.

[0189] In one embodiment, the NLS is a Ty1-like NLS. For example, in one embodiment, the Ty1-like NLS comprises KKRX motif. In one embodiment, the Ty1-like NLS comprises KKRX motif at the N-terminal end. In one embodiment, the Ty1-like NLS comprises KKR motif. In one embodiment, the Ty1-like NLS comprises KKR motif at the C-terminal end. In one embodiment, the Ty1-like NLS comprises a KKRX and a KKR motif. In one embodiment, the Ty1-like NLS comprises a KKRX at the N-terminal end and a KKR motif at the C-terminal end. In one embodiment, the Ty1-like NLS comprises at least 20 amino acids. In one embodiment, the Ty1-like NLS comprises between 20 and 40 amino acids. In one embodiment, the nucleic acid sequence encoding a Ty1-like NLS comprises a nucleic acid sequence encoding an amino acid sequence at least 70%, at least 71%, at least 72%, at least 73%, at least 74%, at least 75%, at least 76%, at least 77%, at least 78%, at least 79%, at least 80%, at least 81%, at least 82%, at least 83%, at least 84%, at least 85%, at least 86%, at least 87%, at least 88%, at least 89%, at least 90%, at least 91%, at least 92%, at least 93%, at least 94%, at least 95%, at least 96%, at least 97%, at least 98%, or at least 99% identical to one of SEQ ID NOs: 427-1039. In one embodiment, the nucleic acid sequence encoding a Ty1-like NLS comprises a nucleic acid sequence encoding an amino acid sequence of one of SEQ ID NOs: 427-1039, wherein the sequence comprises one or more, two or more, three or more, four or more, five or more, six or more, seven or more, eight or more, nine or more, or ten or more, insertions, deletions or substitutions. In one embodiment, the nucleic acid sequence encoding a Ty1-like NLS comprises a nucleic acid sequence encoding an amino acid sequence of one of SEQ ID NOs: 427-1039.

[0190] In one embodiment, the nucleic acid sequence encoding an NLS encodes two copies of the same NLS. For example, in one embodiment, the nucleic acid sequence encodes a multimer of a first Ty1-derived NLS and a second Ty1-derived NLS.

[0191] In one embodiment, the nucleic acid sequence encoding a NLS comprises a nucleic acid sequence at least 70%, at least 71%, at least 72%, at least 73%, at least 74%, at least 75%, at least 76%, at least 77%, at least 78%, at least 79%, at least 80%, at least 81%, at least 82%, at least 83%, at least 84%, at least 85%, at least 86%, at least 87%, at least 88%, at least 89%, at least 90%, at least 91%, at least 92%, at least 93%, at least 94%, at least 95%, at least 96%, at least 97%, at least 98%, or at least 99% identical to SEQ ID NO:201. In one embodiment, the nucleic acid sequence encoding a NLS comprises a nucleic acid sequence of SEQ ID NO: 201.

[0192] Nuclear Export Signal

[0193] In one embodiment, the nucleic acid molecule comprises a nucleic acid sequence encoding a Nuclear Export Signal (NES). In one embodiment, the NES localizes the protein to the cytoplasm for targeting cytoplasmic RNA. In one embodiment, the nucleic acid sequence encoding the NES comprises a sequence encoding an amino acid sequence at least 70%, at least 71%, at least 72%, at least 73%, at least 74%, at least 75%, at least 76%, at least 77%, at least 78%, at least 79%, at least 80%, at least 81%, at least 82%, at least 83%, at least 84%, at least 85%, at least 86%, at least 87%, at least 88%, at least 89%, at least 90%, at least 91%, at least 92%, at least 93%, at least 94%, at least 95%, at least 96%, at least 97%, at least 98%, or at least 99% identical to SEQ ID NO:75 or 76. In one embodiment, the nucleic acid sequence encoding the NES comprises a sequence encoding an amino acid sequence of SEQ ID NO: 75 or 76.

[0194] In one embodiment, the nucleic acid sequence encoding the NES comprises a sequence at least 70%, at least 71%, at least 72%, at least 73%, at least 74%, at least 75%, at least 76%, at least 77%, at least 78%, at least 79%, at least 80%, at least 81%, at least 82%, at least 83%, at least 84%, at least 85%, at least 86%, at least 87%, at least 88%, at least 89%, at least 90%, at least 91%, at least 92%, at least 93%, at least 94%, at least 95%, at least 96%, at least 97%, at least 98%, or at least 99% identical to SEQ ID NO: 202 or 203. In one embodiment, the nucleic acid sequence encoding the NES comprises a sequence of SEQ ID NO: 202 or 203.

[0195] Organelle Localization Signal

[0196] In one embodiment, the nucleic acid molecule comprises a nucleic acid sequence encoding a localization signal that localizes the protein to an organelle or extracellularly. In one embodiment, the localization signal localizes the protein to the nucleolus, ribosome, vesicle, rough endoplasmic reticulum, Golgi apparatus, cytoskeleton, smooth endoplasmic reticulum, mitochondria, vacuole, cytosol, lysosome, or centriole. A number of localization signals are known in the art.

[0197] Exemplary localization signals include, but are not limited to 1× mitochondrial targeting sequence, 4× mitochondrial targeting sequence, secretory signal sequence (IL-2), myristylation, Calsequestrin leader, KDEL retention and peroxisome targeting sequence.

[0198] In one embodiment, the nucleic acid molecule comprises a nucleic acid sequence encoding a localization signal. In one embodiment, the localization signal localizes the protein to an organelle or extracellularly. In one embodiment, the nucleic acid sequence encoding the localization signal comprises a sequence encoding an amino acid sequence at least 70%, at least 71%, at least 72%, at least 73%, at least 74%, at least 75%, at least 76%, at least 77%, at least 78%, at least 79%, at least 80%, at least 81%, at least 82%, at least 83%, at least 84%, at least 85%, at least 86%, at least 87%, at least 88%, at least 89%, at least 90%, at least 91%, at least 92%, at least 93%, at least 94%, at least 95%, at least 96%, at least 97%, at least 98%, or at least 99% identical to one of SEQ ID NO:77-83. In one embodiment, the nucleic acid sequence encoding the localization signal comprises a sequence encoding an amino acid sequence of one of SEQ ID NO: 77-83.

[0199] In one embodiment, the nucleic acid sequence encoding the localization signal comprises a sequence at least 70%, at least 71%, at least 72%, at least 73%, at least 74%, at least 75%, at least 76%, at least 77%, at least 78%, at least 79%, at least 80%, at least 81%, at least 82%, at least 83%, at least 84%, at least 85%, at least 86%, at least 87%, at least 88%, at least 89%, at least 90%, at least 91%, at least 92%, at least 93%, at least 94%, at least 95%, at least 96%, at least 97%, at least 98%, or at least 99% identical to one of SEQ ID NO:204-210. In one embodiment, the nucleic acid sequence encoding the localization signal comprises a sequence of one of SEQ ID NO: 204-210.

[0200] Purification and/or Detection Tag

[0201] In one embodiment, the nucleic acid molecule comprises a nucleic acid sequence encoding a purification and/or detection tag. In one embodiment, the tag is on the N-terminal end of the protein. In one embodiment, the tag is a 3×FLAG tag. In one embodiment, nucleic acid sequence encoding a purification and/or detection tag encodes an amino acid sequence at least 70%, at least 71%, at least 72%, at least 73%, at least 74%, at least 75%, at least 76%, at least 77%, at least 78%, at least 79%, at least 80%, at least 81%, at least 82%, at least 83%, at least 84%, at least 85%, at least 86%, at least 87%, at least 88%, at least 89%, at least 90%, at least 91%, at least 92%, at least 93%, at least 94%, at least 95%, at least 96%, at least 97%, at least 98%, or at least 99% identical to SEQ ID NO:66. In one embodiment, nucleic acid sequence encoding a purification and/or detection tag encodes an amino acid sequence of SEQ ID NO:66.

[0202] In one embodiment, nucleic acid sequence encoding a purification and/or detection tag comprises sequence at least 70%, at least 71%, at least 72%, at least 73%, at least 74%, at least 75%, at least 76%, at least 77%, at least 78%, at least 79%, at least 80%, at least 81%, at least 82%, at least 83%, at least 84%, at least 85%, at least 86%, at least 87%, at least 88%, at least 89%, at least 90%, at least 91%, at least 92%, at least 93%, at least 94%, at least 95%, at least 96%, at least 97%, at least 98%, or at least 99% identical to SEQ ID NO:194. In one embodiment, nucleic acid sequence encoding a purification and/or detection tag comprises a sequence of SEQ ID NO: 200.

[0203] EraseR Proteins

[0204] In one embodiment, the nucleic acid molecule comprises a nucleic acid sequence encoding a protein of the disclosure, which is effectively delivered to the nucleus, an organelle, the cytoplasm or extracellularly and allow for targeted RNA cleavage. In one embodiment, the nucleic acid sequence encoding a protein encodes an amino acid sequence at least 70%, at least 71%, at least 72%, at least 73%, at least 74%, at least 75%, at least 76%, at least 77%, at least 78%, at least 79%, at least 80%, at least 81%, at least 82%, at least 83%, at least 84%, at least 85%, at least 86%, at least 87%, at least 88%, at least 89%, at least 90%, at least 91%, at least 92%, at least 93%, at least 94%, at least 95%, at least 96%, at least 97%, at least 98%, or at least 99% identical to one of SEQ ID NOs:150-171. In one embodiment, the nucleic acid sequence encoding a protein encodes an amino acid sequence of one of SEQ ID NOs: 150-171.

[0205] In one embodiment, the nucleic acid sequence encoding a protein comprises a sequence at least 70%, at least 71%, at least 72%, at least 73%, at least 74%, at least 75%, at least 76%, at least 77%, at least 78%, at least 79%, at least 80%, at least 81%, at least 82%, at least 83%, at least 84%, at least 85%, at least 86%, at least 87%, at least 88%, at least 89%, at least 90%, at least 91%, at least 92%, at least 93%, at least 94%, at least 95%, at least 96%, at least 97%, at least 98%, or at least 99% identical to one of SEQ ID NOs: 271-290. In one embodiment, the nucleic acid sequence encoding a protein comprises a sequence of one of SEQ ID NOs: 271-290.

### HiLightR

[0206] The present disclosure also provides novel nucleic acid molecules encoding fusions of an editing protein and a fluorescent protein. In one embodiment, the fusion protein combines the visualization capability of the fluorescent protein and the programmable nucleic acid targeting capability of catalytically dead Cas. In some embodiment, the nucleic acid molecule comprises a nucleic acid sequence encoding a localization signal. In one embodiment, the localization signal localizes the protein to the site in which a target RNA is located. Thus, the disclosure provides nucleic acid molecules encoding proteins for visualization of RNA which are capable of localization.

[0207] Editing Protein

[0208] In one embodiment, the nucleic acid molecule comprises a sequence nucleic acid encoding an editing protein. In one embodiment, the editing protein includes, but is not limited to, a CRISPR-associated (Cas) protein, a zinc finger nuclease (ZFN) protein, and a protein having a DNA or RNA binding domain.

[0209] Non-limiting examples of Cas proteins include Cas1, Cas1B, Cas2, Cas3, Cas4, Cas5, Cash, Cas7, Cas8, Cas9, Cas10, Csy1, Csy2, Csy3, Cse1, Cse2, Csc1, Csc2, Csa5, Csn2. Csm2, Csm3, Csm4, Csm5, Csm6, Cmr1, Cmr3, Cmr4, Cmr5, Cmr6, Csb1, Csb2, Csb3, Csx17, Csx14, Csx10, Csx16, CsaX, Csx3, Csx1, Csx15, Csf1, Csf2, Csf3, Csf4, SpCas9, StCas9, NmCas9, SaCas9, CjCas9, CjCas9, AsCpf1, LbCpf1, FnCpf1, VRER SpCas9, VQR SpCas9, xCas9 3.7, homologs thereof, orthologs thereof, or modified versions thereof. In some embodiments, the Cas protein has DNA or RNA cleavage activity. In some embodiments, the Cas protein directs cleavage of one or both strands of a nucleic acid molecule at the location of a target sequence, such as within the target sequence and/or within the complement of the target sequence. In some embodiments, the Cas protein directs cleavage of one or both strands within about 1, 2, 3, 4, 5, 6, 7, 8, 9, 10, 15, 20, 25, 50, 100, 200, 500, or more base pairs from the first or last nucleotide of a target sequence. In one embodiment, the Cas protein is Cas9, Cas13, or Cpf1. In one embodiment, Cas protein is catalytically deficient (dCas).

[0210] In one embodiment, the Cas protein has RNA binding activity. In one embodiment, Cas protein is Cas13. In one embodiment, the Cas protein is PspCas13b, PspCas13b Truncation, AdmCas13d, AspCas13b, AspCas13c, BmaCas13a, BzoCas13b, CamCas13a, CcaCas13b, Cga2Cas13a, CgaCas13a, EbaCas13a, EreCas13a, EsCas13d, FbrCas13b, FnbCas13c, FndCas13c, FnfCas13c, FnsCas13c, FpeCas13c, FulCas13c, HheCas13a, LbfCas13a, LbmCas13a, LbnCas13a, LbuCas13a, LseCas13a, LshCas13a, LspCas13a, Lwa2cas13a, LwaCas13a, LweCas13a, PauCas13b, PbuCas13b, PgiCas13b, PguCas13b, Pin2Cas13b, Pin3Cas13b, PinCas13b, Pprcas13a, PsaCas13b, PsmCas13b, RaCas13d, RanCas13b, RcdCas13a, RcrCas13a, RcsCas13a, RfxCas13d, UrCas13d, dPspCas13b, PspCas13b_A133H, PspCas13b_A1058H, dPspCas13b truncation, dAdmCas13d, dAspCas13b, dAspCas13c, dBmaCas13a, dBzoCas13b, dCamCas13a, dCcaCas13b, dCga2Cas13a, dCgaCas13a, dEbaCas13a, dEreCas13a, dEsCas13d, dFbrCas13b, dFnbCas13c, dFndCas13c, dFnfCas13c, dFnsCas13c, dFpeCas13c, dFulCas13c, dHheCas13a, dLbfCas13a, dLbmCas13a, dLbnCas13a, dLbuCas13a, dLseCas13a, dLshCas13a, dLspCas13a, dLwa2cas13a, dLwaCas13a, dLweCas13a, dPauCas13b, dPbuCas13b, dPgiCas13b, dPguCas13b, dPin2Cas13b, dPin3Cas13b, dPinCas13b, dPprCas13a, dPsaCas13b, dPsmCas13b, dRaCas13d, dRanCas13b, dRcdCas13a, dRcrCas13a, dRcsCas13a, dRfxCas13d, or dUrCas13d. Additional Cas proteins are known in the art (e.g., Konermann et al., Cell, 2018, 173:665-676 e14, Yan et al., Mol Cell, 2018, 7:327-339 e5; Cox, D. B. T., et al., Science, 2017, 358: 1019-1027; Abudayyeh et al., Nature, 2017, 550: 280-284, Gootenberg et al., Science, 2017, 356: 438-442; and East-Seletsky et al., Mol Cell, 2017, 66: 373-383 e3, which are herein incorporated by reference).

[0211] In one embodiment, the nucleic acid sequence encoding a Cas protein comprises a nucleic acid sequence encoding an amino acid sequence at least 70%, at least 71%, at least 72%, at least 73%, at least 74%, at least 75%, at least 76%, at least 77%, at least 78%, at least 79%, at least 80%, at least 81%, at least 82%, at least 83%, at least 84%, at least 85%, at least 86%, at least 87%, at least 88%, at least 89%, at least 90%, at least 91%, at least 92%, at least 93%, at least 94%, at least 95%, at least 96%, at least 97%, at least 98%, or at least 99% identical to one of SEQ ID NOs: 1-48. In one embodiment, the nucleic acid sequence encoding a Cas protein comprises a nucleic acid sequence encoding an amino acid sequence of a variant of one of SEQ ID NOs:1-48, wherein the variant renders the Cas protein catalytically inactive. In one embodiment, the nucleic acid sequence encoding a Cas protein comprises a nucleic acid sequence encoding an amino acid sequence of one of SEQ ID NOs:1-46 having one or more insertions, deletions or substitutions, wherein the one or more insertions, deletions or substitutions renders the Cas protein catalytically inactive. In one embodiment, the nucleic acid sequence encoding a Cas protein comprises a nucleic acid sequence encoding an amino acid sequence of one of SEQ ID NOs:1-48. In one embodiment, the nucleic acid sequence encoding a Cas protein comprises a nucleic acid sequence encoding an amino acid sequence of one of SEQ ID NOs:47-48.

[0212] In one embodiment, the nucleic acid sequence encoding a Cas protein comprises a nucleic acid sequence at least 70%, at least 71%, at least 72%, at least 73%, at least 74%, at least 75%, at least 76%, at least 77%, at least 78%, at least 79%, at least 80%, at least 81%, at least 82%, at least 83%, at least 84%, at least 85%, at least 86%, at least 87%, at least 88%, at least 89%, at least 90%, at least 91%, at least 92%, at least 93%, at least 94%, at least 95%, at least 96%, at least 97%, at least 98%, or at least 99% identical to one of SEQ ID NOs: 182-185. In one embodiment, the nucleic acid sequence encoding a Cas protein comprises a of a variant of one of SEQ ID NOs: 188-190, wherein the variant renders the encoded Cas protein catalytically inactive. In one embodiment, the nucleic acid sequence encoding a Cas protein comprises a nucleic acid sequence of one of SEQ ID NOs: 188-191. In one embodiment, the nucleic acid sequence encoding a Cas protein comprises a nucleic acid sequence of one of SEQ ID NOs:190-191.

[0213] Fluorescent Protein

[0214] In one embodiment, the nucleic acid molecule comprises a nucleic acid sequence encoding a fluorescent protein. In one embodiment, the fluorescent protein is eGFP, mCherry, mCherry-MBNL1, sfGFP, sfGFP(1-10), sfGFP(1-10)-L-(11), sfCherry 7xS11, S11, Emerald, Superfolder GFP, Azami Green, mWasabi, TagGFP, TurboGFP, AcGFP, ZsGreen, T-Sapphire, Blue Fluorescent Proteins, EBFP, EBFP2, Azurite, mTagBFP, Cyan Fluorescent Proteins, eCFP, mECFP, Cerulean, mTurquoise, CyPet, AmCyanl, Midori-Ishi Cyan, TagCFP, mTFP1 (Teal), Yellow Fluorescent Proteins, EYFP, Topaz, Venus, mCitrine, YPet, TagYFP, PhiYFP, ZsYellow1, mBanana, Orange Fluorescent Proteins, Kusabira Orange, Kusabira Orange2, mOrange, mOrange2, dTomato, dTomato-Tandem, TagRFP, TagRFP-T, DsRed, DsRed2, DsRed-Express (T1), DsRed-Monomer, mTangerine, Red Fluorescent Proteins, mRuby, mApple, mStrawberry, AsRed2, mRFP1, JRed, HcRed1, mRaspberry, dKeima-Tandem, HcRed-Tandem, mPlum, or AQ143.

[0215] In one embodiment, the fluorescent protein is eGFP, mCherry, sfGFP, sfGFP(1-10), sfGFP(1-10)-L-(11), sfCherry or 7xS11. In one embodiment, nucleic acid sequence encoding a fluorescent protein comprises a sequence encoding an amino acid sequence at least 70%, at least 71%, at least 72%, at least 73%, at least 74%, at least 75%, at least 76%, at least 77%, at least 78%, at least 79%, at least 80%, at least 81%, at least 82%, at least 83%, at least 84%, at least 85%, at least 86%, at least 87%, at least 88%, at least 89%, at least 90%, at least 91%, at least 92%, at least 93%, at least 94%, at least 95%, at least 96%, at least 97%, at least 98%, or at least 99% identical to one of SEQ ID NOs:49-56. In one embodiment, nucleic acid sequence encoding a fluorescent protein comprises a sequence encoding an amino acid sequence of one of SEQ ID NOs: 49-56.

[0216] In one embodiment, nucleic acid sequence encoding a fluorescent protein comprises a nucleic acid sequence at least 70%, at least 71%, at least 72%, at least 73%, at least 74%, at least 75%, at least 76%, at least 77%, at least 78%, at least 79%, at least 80%, at least 81%, at least 82%, at least 83%, at least 84%, at least 85%, at least 86%, at least 87%, at least 88%, at least 89%, at least 90%, at least 91%, at least 92%, at least 93%, at least 94%, at least 95%, at least 96%, at least 97%, at least 98%, or at least 99% identical to one of SEQ ID NOs:192-195. In one embodiment, nucleic acid sequence encoding a fluorescent protein comprises a nucleic acid sequence of one of SEQ ID NOs: 192-195.

[0217] Localization Signal

[0218] In some embodiments, the nucleic acid molecule comprises a nucleic acid sequence encoding a localization signal, such as a nuclear localization signal (NLS), nuclear export signal (NES) or other localization signals to localize to the cytoplasm or to organelles, such as mitochondria. In one embodiment, the localization signal localizes the fusion protein to the site in which the target RNA is located.

[0219] Nuclear Localization Signal

[0220] In one embodiment, the nucleic acid molecule comprises a nucleic acid sequence encoding a nuclear localization signal (NLS). In one embodiment, the NLS is a retrotransposon NLS. In one embodiment, the NLS is derived from Ty1, yeast GAL4, SKI3, L29 or histone H2B proteins, polyoma virus large T protein, VP1 or VP2 capsid protein, SV40 VP1 or VP2 capsid protein, Adenovirus E1 a or DBP protein, influenza virus NS1 protein, hepatitis vims core antigen or the mammalian lamin, c-myc, max, c-myb, p53, c-erbA, jun, Tax, steroid receptor or Mx proteins, Nucleoplasmin (NPM2), Nucleophosmin (NPM1), or simian vims 40 (“SV40”) T-antigen.

[0221] In one embodiment, the NLS is a Ty1 or Ty1-derived NLS, a Ty2 or Ty2-derived NLS or a MAK11 or MAK11-derived NLS. In one embodiment, the Ty1 NLS comprises an amino acid sequence of SEQ ID NO:67. In one embodiment, the Ty2 NLS comprises an amino acid sequence of SEQ ID NO:68. In one embodiment, the MAK11 NLS comprises an amino acid sequence of SEQ ID NO:69. In one embodiment, the nucleic acid sequence encoding a NLS comprises a nucleic acid sequence encoding an amino acid sequence at least 70%, at least 71%, at least 72%, at least 73%, at least 74%, at least 75%, at least 76%, at least 77%, at least 78%, at least 79%, at least 80%, at least 81%, at least 82%, at least 83%, at least 84%, at least 85%, at least 86%, at least 87%, at least 88%, at least 89%, at least 90%, at least 91%, at least 92%, at least 93%, at least 94%, at least 95%, at least 96%, at least 97%, at least 98%, or at least 99% identical to one of SEQ ID NOs: 67-74 and 427-1039. In one embodiment, the nucleic acid sequence encoding a NLS comprises a nucleic acid sequence encoding an amino acid sequence of one of SEQ ID NOs: 67-74 and 427-1039.

[0222] In one embodiment, the NLS is a Ty1-like NLS. For example, in one embodiment, the Ty1-like NLS comprises KKRX motif. In one embodiment, the Ty1-like NLS comprises KKRX motif at the N-terminal end. In one embodiment, the Ty1-like NLS comprises KKR motif. In one embodiment, the Ty1-like NLS comprises KKR motif at the C-terminal end. In one embodiment, the Ty1-like NLS comprises a KKRX and a KKR motif. In one embodiment, the Ty1-like NLS comprises a KKRX at the N-terminal end and a KKR motif at the C-terminal end. In one embodiment, the Ty1-like NLS comprises at least 20 amino acids. In one embodiment, the Ty1-like NLS comprises between 20 and 40 amino acids. In one embodiment, the nucleic acid sequence encoding a Ty1-like NLS comprises a nucleic acid sequence encoding an amino acid sequence at least 70%, at least 71%, at least 72%, at least 73%, at least 74%, at least 75%, at least 76%, at least 77%, at least 78%, at least 79%, at least 80%, at least 81%, at least 82%, at least 83%, at least 84%, at least 85%, at least 86%, at least 87%, at least 88%, at least 89%, at least 90%, at least 91%, at least 92%, at least 93%, at least 94%, at least 95%, at least 96%, at least 97%, at least 98%, or at least 99% identical to one of SEQ ID NOs: 427-1039. In one embodiment, the nucleic acid sequence encoding a Ty1-like NLS comprises a nucleic acid sequence encoding an amino acid sequence of one of SEQ ID NOs: 427-1039, wherein the sequence comprises one or more, two or more, three or more, four or more, five or more, six or more, seven or more, eight or more, nine or more, or ten or more, insertions, deletions or substitutions. In one embodiment, the nucleic acid sequence encoding a Ty1-like NLS comprises a nucleic acid sequence encoding an amino acid sequence of one of SEQ ID NOs: 427-1039.

[0223] In one embodiment, the nucleic acid sequence encoding an NLS encodes two copies of the same NLS. For example, in one embodiment, the nucleic acid sequence encodes a multimer of a first Ty1-derived NLS and a second Ty1-derived NLS.

[0224] In one embodiment, the nucleic acid sequence encoding a NLS comprises a nucleic acid sequence at least 70%, at least 71%, at least 72%, at least 73%, at least 74%, at least 75%, at least 76%, at least 77%, at least 78%, at least 79%, at least 80%, at least 81%, at least 82%, at least 83%, at least 84%, at least 85%, at least 86%, at least 87%, at least 88%, at least 89%, at least 90%, at least 91%, at least 92%, at least 93%, at least 94%, at least 95%, at least 96%, at least 97%, at least 98%, or at least 99% identical to SEQ ID NO:201. In one embodiment, the nucleic acid sequence encoding a NLS comprises a nucleic acid sequence of SEQ ID NO: 201.

[0225] Nuclear Export Signal

[0226] In one embodiment, the nucleic acid molecule comprises a nucleic acid sequence encoding a Nuclear Export Signal (NES). In one embodiment, the NES localizes the fusion protein to the cytoplasm for targeting cytoplasmic RNA. In one embodiment, the nucleic acid sequence encoding the NES comprises a sequence encoding an amino acid sequence at least 70%, at least 71%, at least 72%, at least 73%, at least 74%, at least 75%, at least 76%, at least 77%, at least 78%, at least 79%, at least 80%, at least 81%, at least 82%, at least 83%, at least 84%, at least 85%, at least 86%, at least 87%, at least 88%, at least 89%, at least 90%, at least 91%, at least 92%, at least 93%, at least 94%, at least 95%, at least 96%, at least 97%, at least 98%, or at least 99% identical to SEQ ID NO:802 or 803. In one embodiment, the nucleic acid sequence encoding the NES comprises a sequence encoding an amino acid sequence of SEQ ID NO: 75 or 76.

[0227] In one embodiment, the nucleic acid sequence encoding the NES comprises a sequence at least 70%, at least 71%, at least 72%, at least 73%, at least 74%, at least 75%, at least 76%, at least 77%, at least 78%, at least 79%, at least 80%, at least 81%, at least 82%, at least 83%, at least 84%, at least 85%, at least 86%, at least 87%, at least 88%, at least 89%, at least 90%, at least 91%, at least 92%, at least 93%, at least 94%, at least 95%, at least 96%, at least 97%, at least 98%, or at least 99% identical to SEQ ID NO: 202 or 203. In one embodiment, the nucleic acid sequence encoding the NES comprises a sequence of SEQ ID NO: 202 or 203.

[0228] Organelle Localization Signal

[0229] In one embodiment, the nucleic acid molecule comprises a nucleic acid sequence encoding a localization signal that localizes the fusion protein to an organelle or extracellularly. In one embodiment, the localization signal localizes the protein to the nucleolus, ribosome, vesicle, rough endoplasmic reticulum, Golgi apparatus, cytoskeleton, smooth endoplasmic reticulum, mitochondria, vacuole, cytosol, lysosome, or centriole. A number of localization signals are known in the art.

[0230] Exemplary localization signals include, but are not limited to 1× mitochondrial targeting sequence, 4× mitochondrial targeting sequence, secretory signal sequence (IL-2), myristylation, Calsequestrin leader, KDEL retention and peroxisome targeting sequence.

[0231] In one embodiment, the nucleic acid molecule comprises a nucleic acid sequence encoding a localization signal. In one embodiment, the localization signal localizes the fusion protein to an organelle or extracellularly. In one embodiment, the nucleic acid sequence encoding the localization signal comprises a sequence encoding an amino acid sequence at least 70%, at least 71%, at least 72%, at least 73%, at least 74%, at least 75%, at least 76%, at least 77%, at least 78%, at least 79%, at least 80%, at least 81%, at least 82%, at least 83%, at least 84%, at least 85%, at least 86%, at least 87%, at least 88%, at least 89%, at least 90%, at least 91%, at least 92%, at least 93%, at least 94%, at least 95%, at least 96%, at least 97%, at least 98%, or at least 99% identical to SEQ ID NO:77-83. In one embodiment, the nucleic acid sequence encoding the localization signal comprises a sequence encoding an amino acid sequence of SEQ ID NO: 77-83.

[0232] In one embodiment, the nucleic acid sequence encoding the localization signal comprises a sequence at least 70%, at least 71%, at least 72%, at least 73%, at least 74%, at least 75%, at least 76%, at least 77%, at least 78%, at least 79%, at least 80%, at least 81%, at least 82%, at least 83%, at least 84%, at least 85%, at least 86%, at least 87%, at least 88%, at least 89%, at least 90%, at least 91%, at least 92%, at least 93%, at least 94%, at least 95%, at least 96%, at least 97%, at least 98%, or at least 99% identical to SEQ ID NO:204-210. In one embodiment, the nucleic acid sequence encoding the localization signal comprises a sequence of SEQ ID NO: 204-210.

[0233] Purification and/or Detection Tag

[0234] In one embodiment, the nucleic acid molecule comprises a nucleic acid sequence encoding a purification and/or detection tag. In one embodiment, the tag is on the N-terminal end of the fusion protein. In one embodiment, the tag is a 3×FLAG tag. In one embodiment, nucleic acid sequence encoding a purification and/or detection tag encodes an amino acid sequence at least 70%, at least 71%, at least 72%, at least 73%, at least 74%, at least 75%, at least 76%, at least 77%, at least 78%, at least 79%, at least 80%, at least 81%, at least 82%, at least 83%, at least 84%, at least 85%, at least 86%, at least 87%, at least 88%, at least 89%, at least 90%, at least 91%, at least 92%, at least 93%, at least 94%, at least 95%, at least 96%, at least 97%, at least 98%, or at least 99% identical to SEQ ID NO:66. In one embodiment, nucleic acid sequence encoding a purification and/or detection tag encodes an amino acid sequence of SEQ ID NO:66.

[0235] In one embodiment, nucleic acid sequence encoding a purification and/or detection tag comprises sequence at least 70%, at least 71%, at least 72%, at least 73%, at least 74%, at least 75%, at least 76%, at least 77%, at least 78%, at least 79%, at least 80%, at least 81%, at least 82%, at least 83%, at least 84%, at least 85%, at least 86%, at least 87%, at least 88%, at least 89%, at least 90%, at least 91%, at least 92%, at least 93%, at least 94%, at least 95%, at least 96%, at least 97%, at least 98%, or at least 99% identical to SEQ ID NO: 200. In one embodiment, nucleic acid sequence encoding a purification and/or detection tag comprises a sequence of SEQ ID NO: 200.

[0236] Linker

[0237] In one embodiment, the nucleic acid molecule comprises a nucleic acid sequence encoding a linker peptide. In one embodiment, the linker links the Cas protein and fluorescent protein. In one embodiment, the linker is connected to the C-terminal end of the Cas protein and to the N-terminal end of the fluorescent protein. In one embodiment, the linker is connected to the N-terminal end of the Cas protein and to the C-terminal end of the fluorescent protein.

[0238] In one embodiment, the nucleic acid sequence encoding a linker peptide encodes an amino acid sequence at least 70%, at least 71%, at least 72%, at least 73%, at least 74%, at least 75%, at least 76%, at least 77%, at least 78%, at least 79%, at least 80%, at least 81%, at least 82%, at least 83%, at least 84%, at least 85%, at least 86%, at least 87%, at least 88%, at least 89%, at least 90%, at least 91%, at least 92%, at least 93%, at least 94%, at least 95%, at least 96%, at least 97%, at least 98%, or at least 99% identical to one of SEQ ID NOs:57-65. In one embodiment, the nucleic acid sequence encoding a linker peptide encodes an amino acid sequence of one of SEQ ID NOs: 57-65.

[0239] In one embodiment, the nucleic acid sequence encoding a linker peptide comprises a sequence at least 70%, at least 71%, at least 72%, at least 73%, at least 74%, at least 75%, at least 76%, at least 77%, at least 78%, at least 79%, at least 80%, at least 81%, at least 82%, at least 83%, at least 84%, at least 85%, at least 86%, at least 87%, at least 88%, at least 89%, at least 90%, at least 91%, at least 92%, at least 93%, at least 94%, at least 95%, at least 96%, at least 97%, at least 98%, or at least 99% identical to one of SEQ ID NOs:196-199. In one embodiment, the nucleic acid sequence encoding a linker peptide comprises sequence of one of SEQ ID NOs: 196-199.

[0240] HilightR Fusion Proteins

[0241] In one embodiment, the nucleic acid molecule comprises a nucleic acid sequence encoding a fusion protein of the disclosure, which is effectively delivered to the nucleus, an organelle, the cytoplasm or extracellularly and allow for targeted RNA cleavage. In one embodiment, the nucleic acid sequence encoding a fusion protein encodes an amino acid sequence at least 70%, at least 71%, at least 72%, at least 73%, at least 74%, at least 75%, at least 76%, at least 77%, at least 78%, at least 79%, at least 80%, at least 81%, at least 82%, at least 83%, at least 84%, at least 85%, at least 86%, at least 87%, at least 88%, at least 89%, at least 90%, at least 91%, at least 92%, at least 93%, at least 94%, at least 95%, at least 96%, at least 97%, at least 98%, or at least 99% identical to one of SEQ ID NOs:84-149. In one embodiment, the nucleic acid sequence encoding a fusion protein encodes an amino acid sequence of one of SEQ ID NOs: 84-149.

[0242] In one embodiment, the nucleic acid sequence encoding a fusion protein comprises a sequence at least 70%, at least 71%, at least 72%, at least 73%, at least 74%, at least 75%, at least 76%, at least 77%, at least 78%, at least 79%, at least 80%, at least 81%, at least 82%, at least 83%, at least 84%, at least 85%, at least 86%, at least 87%, at least 88%, at least 89%, at least 90%, at least 91%, at least 92%, at least 93%, at least 94%, at least 95%, at least 96%, at least 97%, at least 98%, or at least 99% identical to one of SEQ ID NOs: 211-270. In one embodiment, the nucleic acid sequence encoding a fusion protein comprises a sequence of one of SEQ ID NOs: 211-270.

Targeting Nucleic Acids and CRISPR RNAs (crRNAs)

[0243] In one aspect, the disclosure provides CRISPR RNAs (crRNAs) for targeting Cas to a target RNA. In one embodiment, crRNA comprises guide sequence. In one embodiment, the crRNA comprises a direct repeat (DR) sequence. In one embodiment the crRNA comprises a direct repeat sequence and a guide sequence fused or linked to a guide sequence or spacer sequence. In one embodiment the direct repeat sequence may be located upstream (i.e., 5′) from the guide sequence or spacer sequence. In other embodiments, the direct repeat sequence may be located downstream (i.e., 3′) from the guide sequence or spacer sequence.

[0244] In some embodiments, the crRNA comprises a stem loop. In one embodiment, the crRNA comprises a single stem loop. In one embodiment, the direct repeat sequence forms a stem loop. In one embodiment, the direct repeat sequence forms a single stem loop.

[0245] In one embodiment, the spacer length of the guide RNA is from 15 to 35 nt. In one embodiment, the spacer length of the guide RNA is at least 15 nucleotides. In one embodiment the spacer length is from 15 to 17 nt, e.g., 15, 16, or 17 nt, from 17 to 20 nt, e.g., 17, 18, 19, or 20 nt, from 20 to 24 nt, e.g., 20, 21, 22, 23, or 24 nt, from 23 to 25 nt, e.g., 23, 24, or 25 nt, from 24 to 27 nt, e.g., 24, 25, 26, or 27 nt, from 27-30 nt, e.g., 27, 28, 29, or 30 nt, from 30-35 nt, e.g., 30, 31, 32, 33, 34, or 35 nt, or 35 nt or longer.

[0246] In general, a guide sequence is any polynucleotide sequence having sufficient complementarity with a target polynucleotide sequence to hybridize with the target sequence and direct sequence-specific binding of a CRISPR complex to the target sequence. In some embodiments, the degree of complementarity between a guide sequence and its corresponding target sequence, when optimally aligned using a suitable alignment algorithm, is about or more than about 50%, 60%, 75%, 80%, 85%, 90%, 95%, 97.5%, 99%, or more. Optimal alignment may be determined with the use of any suitable algorithm for aligning sequences, non-limiting example of which include the Smith-Waterman algorithm, the Needleman-Wunsch algorithm, algorithms based on the Burrows-Wheeler Transform (e.g. the Burrows Wheeler Aligner), ClustalW, Clustal X, BLAT, Novoalign (Novocraft Technologies; available at www.novocraft.com), ELAND (Illumina, San Diego, Calif.), SOAP (available at soap.genomics.org.cn), and Maq (available at maq.sourceforge.net). In some embodiments, a guide sequence is about or more than about 5, 10, 11, 12, 13, 14, 15, 16, 17, 18, 19, 20, 21, 22, 23, 24, 25, 26, 27, 28, 29, 30, 35, 40, 45, 50, 75, or more nucleotides in length. In some embodiments, a guide sequence is less than about 75, 50, 45, 40, 35, 30, 25, 20, 15, 12, or fewer nucleotides in length. Preferably the guide sequence is 10 30 nucleotides long. The ability of a guide sequence to direct sequence-specific binding of a CRISPR complex to a target sequence may be assessed by any suitable assay. For example, the components of a CRISPR system sufficient to form a CRISPR complex, including the guide sequence to be tested, may be provided to a host cell having the corresponding target sequence, such as by transfection with vectors encoding the components of the CRISPR sequence, followed by an assessment of preferential cleavage within the target sequence, such as by Surveyor assay as described herein. Similarly, cleavage of a target polynucleotide sequence may be evaluated in a test tube by providing the target sequence, components of a CRISPR complex, including the guide sequence to be tested and a control guide sequence different from the test guide sequence, and comparing binding or rate of cleavage at the target sequence between the test and control guide sequence reactions. Other assays are possible, and will occur to those skilled in the art.

[0247] In some embodiments of CRISPR-Cas systems, the degree of complementarity between a guide sequence and its corresponding target sequence can be about or more than about 50%, 60%, 75%, 80%, 85%, 90%, 95%, 97.5%, 99%, or 100%; a guide or RNA or sgRNA can be about or more than about 5, 10, 11, 12, 13, 14, 15, 16, 17, 18, 19, 20, 21, 22, 23, 24, 25, 26, 27, 28, 29, 30, 35, 40, 45, 50, 75, or more nucleotides in length; or guide or RNA or sgRNA can be less than about 75, 50, 45, 40, 35, 30, 25, 20, 15, 12, or fewer nucleotides in length; and advantageously tracr RNA is 30 or 50 nucleotides in length. However, an aspect of the disclosure is to reduce off-target interactions, e.g., reduce the guide interacting with a target sequence having low complementarity. Indeed, in the examples, it is shown that the disclosure involves mutations that result in the CRISPR-Cas system being able to distinguish between target and off-target sequences that have greater than 80% to about 95% complementarity, e.g., 83%-84% or 88-89% or 94-95% complementarity (for instance, distinguishing between a target having 18 nucleotides from an off-target of 18 nucleotides having 1, 2 or 3 mismatches). Accordingly, in the context of the present disclosure the degree of complementarity between a guide sequence and its corresponding target sequence is greater than 94.5% or 95% or 95.5% or 96% or 96.5% or 97% or 97.5% or 98% or 98.5% or 99% or 99.5% or 99.9%, or 100%. Off target is less than 100% or 99.9% or 99.5% or 99% or 99% or 98.5% or 98% or 97.5% or 97% or 96.5% or 96% or 95.5% or 95% or 94.5% or 94% or 93% or 92% or 91% or 90% or 89% or 88% or 87% or 86% or 85% or 84% or 83% or 82% or 81% or 80% complementarity between the sequence and the guide, with it advantageous that off target is 100% or 99.9% or 99.5% or 99% or 99% or 98.5% or 98% or 97.5% or 97% or 96.5% or 96% or 95.5% or 95% or 94.5% complementarity between the sequence and the guide.

[0248] In one embodiment, the crRNA comprises a substantially complementary to a Coronavirus genomic mRNA sequence or a Coronavirus subgenomic mRNA sequence. For example, in one embodiment, the crRNA comprises a sequence substantially complementary to a Coronavirus leader sequence, S sequence, E sequence, M sequence, N sequence, or S2M sequence. In one embodiment, the crRNA comprises a sequence substantially complementary to a Coronavirus leader sequence, N sequence, or S2M sequence.

[0249] In one embodiment, the crRNA comprises a sequence that is substantially complementary to a sequence at least 70%, at least 71%, at least 72%, at least 73%, at least 74%, at least 75%, at least 76%, at least 77%, at least 78%, at least 79%, at least 80%, at least 81%, at least 82%, at least 83%, at least 84%, at least 85%, at least 86%, at least 87%, at least 88%, at least 89%, at least 90%, at least 91%, at least 92%, at least 93%, at least 94%, at least 95%, at least 96%, at least 97%, at least 98%, or at least 99% homologous to a sequence selected from SEQ ID NOs: 307-327, or a fragment thereof. In one embodiment, the crRNA comprises a sequence that is substantially complementary to a sequence selected from SEQ ID NOs: 307-327, or a fragment thereof.

[0250] In one embodiment, the crRNA comprises a sequence that is substantially complementary to a sequence at least 70%, at least 71%, at least 72%, at least 73%, at least 74%, at least 75%, at least 76%, at least 77%, at least 78%, at least 79%, at least 80%, at least 81%, at least 82%, at least 83%, at least 84%, at least 85%, at least 86%, at least 87%, at least 88%, at least 89%, at least 90%, at least 91%, at least 92%, at least 93%, at least 94%, at least 95%, at least 96%, at least 97%, at least 98%, or at least 99% homologous to a sequence selected from SEQ ID NOs:308-314, 316-321, and 326-327. In one embodiment, the crRNA comprises a sequence that is substantially complementary to a sequence selected from SEQ ID NOs: 308-314, 316-321, and 326-327.

[0251] In one embodiment, the crRNA comprises a sequence at least 70%, at least 71%, at least 72%, at least 73%, at least 74%, at least 75%, at least 76%, at least 77%, at least 78%, at least 79%, at least 80%, at least 81%, at least 82%, at least 83%, at least 84%, at least 85%, at least 86%, at least 87%, at least 88%, at least 89%, at least 90%, at least 91%, at least 92%, at least 93%, at least 94%, at least 95%, at least 96%, at least 97%, at least 98%, or at least 99% homologous to a sequence selected from SEQ ID NOs: 356-391. In one embodiment, the crRNA comprises a sequence selected from SEQ ID NOs: 356-391.

[0252] In one embodiment, the disclosure provides crRNA having a sequence substantially complementary to an influenza virus sequence. In one embodiment, the crRNA comprises a substantially complementary to an influenza virus genomic mRNA sequence or a subgenomic mRNA sequence. For example, in one embodiment, the crRNA comprises a sequence substantially complementary to an Influenza virus PB2 sequence, PB1 sequence, PA sequence, HA sequence, NP sequence, NA sequence, M sequence or NS sequence. In one embodiment, the crRNA comprises a sequence substantially complementary to an Influenza virus PB2 sequence, PB1 sequence, PA sequence, NP sequence, or M sequence.

[0253] In one embodiment, the crRNA comprises a sequence that is substantially complementary to a sequence at least 70%, at least 71%, at least 72%, at least 73%, at least 74%, at least 75%, at least 76%, at least 77%, at least 78%, at least 79%, at least 80%, at least 81%, at least 82%, at least 83%, at least 84%, at least 85%, at least 86%, at least 87%, at least 88%, at least 89%, at least 90%, at least 91%, at least 92%, at least 93%, at least 94%, at least 95%, at least 96%, at least 97%, at least 98%, or at least 99% homologous to a sequence selected from SEQ ID NOs:328-347, or a fragment thereof. In one embodiment, the crRNA comprises a sequence that is substantially complementary to a sequence selected from SEQ ID NOs: 328-347, or a fragment thereof.

[0254] In one embodiment, the crRNA comprises a sequence that is substantially complementary to a viral RNA sequence. In one embodiment, the crRNA comprises a sequence that is substantially complementary to a sequence a positive-sense viral RNA sequence. In one embodiment, the crRNA comprises a sequence that is substantially complementary to a sequence a negative-sense viral RNA sequence. In one embodiment, the crRNA comprises a sequence that at least 70%, at least 71%, at least 72%, at least 73%, at least 74%, at least 75%, at least 76%, at least 77%, at least 78%, at least 79%, at least 80%, at least 81%, at least 82%, at least 83%, at least 84%, at least 85%, at least 86%, at least 87%, at least 88%, at least 89%, at least 90%, at least 91%, at least 92%, at least 93%, at least 94%, at least 95%, at least 96%, at least 97%, at least 98%, or at least 99% homologous to a sequence selected from SEQ ID NOs: 392-401. In one embodiment, the crRNA comprises a sequence selected from SEQ ID NOs: 392-401.

[0255] In one embodiment, the disclosure provides crRNA having a sequence substantially complementary an expanded RNA repeat. In one embodiment, crRNA comprises a sequence substantially complementary an expanded CUG repeat. For example, the RNA repeat includes, but is not limited to, a CTG repeat, CCTG repeat, GGGCC repeat, CAG repeat, CGG repeat, ATTCT repeat, and TGGAA repeat. In one embodiment, the crRNA comprises a sequence that is substantially complementary to a sequence at least 70%, at least 71%, at least 72%, at least 73%, at least 74%, at least 75%, at least 76%, at least 77%, at least 78%, at least 79%, at least 80%, at least 81%, at least 82%, at least 83%, at least 84%, at least 85%, at least 86%, at least 87%, at least 88%, at least 89%, at least 90%, at least 91%, at least 92%, at least 93%, at least 94%, at least 95%, at least 96%, at least 97%, at least 98%, or at least 99% homologous to a sequence selected from SEQ ID NOs:301-306, or a fragment thereof. In one embodiment, the crRNA comprises a sequence that is substantially complementary to a sequence selected from SEQ ID NOs: 301-306, or a fragment thereof. In one embodiment, the crRNA comprises a sequence that at least 70%, at least 71%, at least 72%, at least 73%, at least 74%, at least 75%, at least 76%, at least 77%, at least 78%, at least 79%, at least 80%, at least 81%, at least 82%, at least 83%, at least 84%, at least 85%, at least 86%, at least 87%, at least 88%, at least 89%, at least 90%, at least 91%, at least 92%, at least 93%, at least 94%, at least 95%, at least 96%, at least 97%, at least 98%, or at least 99% homologous to a sequence selected from SEQ ID NOs: 348-354. In one embodiment, the crRNA comprises a sequence selected from SEQ ID NOs: 348-354.

[0256] In one embodiment, the crRNA comprises a direct repeat (DR) sequence. In one embodiment, the DR sequence is 5′ of the sequence substantially complementary to the target sequence. For example, in one embodiment, the DR sequence is 5′ of the sequence substantially complementary to a Coronavirus genomic mRNA sequence or a Coronavirus subgenomic mRNA sequence. In one embodiment, the DR sequence is 5′ of the sequence substantially complementary to an influenza virus genomic RNA sequence or a influenza virus subgenomic RNA sequence. In one embodiment, the DR sequence is 5′ of the sequence substantially complementary to an expanded RNA repeat sequence. In one embodiment, the DR sequence enhances the activity of Cas13 targeting to a target sequence, Cas13 catalytic activity, or both. For example, in one embodiment, the DR sequence comprises a mutation. For example, in one embodiment, the DR sequence comprises a T17C point mutation. In one embodiment, the DR sequence comprises a T18C point mutation. In one embodiment, the DR sequence is 5′ of a sequence at least 80% homologous to a sequence selected from SEQ ID NOs: 348-341.

[0257] In one embodiment, the DR sequence is 3′ of the sequence substantially complementary to the target sequence. For example, in one embodiment, the DR sequence is 3′ of the sequence substantially complementary to a Coronavirus genomic mRNA sequence or a Coronavirus subgenomic mRNA sequence. In one embodiment, the DR sequence is 3′ of the sequence substantially complementary to an Influenza virus genomic mRNA sequence or an Influenza virus subgenomic mRNA sequence. In one embodiment, the DR sequence is 3′ of the sequence substantially complementary to an expanded RNA repeat sequence. In one embodiment, the DR sequence is 3′ of a sequence at least 70%, at least 71%, at least 72%, at least 73%, at least 74%, at least 75%, at least 76%, at least 77%, at least 78%, at least 79%, at least 80%, at least 81%, at least 82%, at least 83%, at least 84%, at least 85%, at least 86%, at least 87%, at least 88%, at least 89%, at least 90%, at least 91%, at least 92%, at least 93%, at least 94%, at least 95%, at least 96%, at least 97%, at least 98%, or at least 99% homologous to a sequence selected from SEQ ID NOs: 348-341.

[0258] In one embodiment, selection of a 5′ or 3′ DR sequence is dependent on the Cas protein ortholog used. In one embodiment the DR sequence comprises a sequence selected from SEQ ID NOs: 291-303.

### Tandem Arrays

[0259] In one embodiment, the disclosure provides tandem crRNA arrays. In one embodiment, the tandem crRNA arrays allow for a single promoter to drive expression of multiple crRNAs. In one embodiment, the tandem array comprises one or more, two or more, three or more, four or more, five or more six or more, seven or more or eight or more crRNA sequences.

[0260] In one embodiment, each crRNA in the tandem crRNA array comprises a direct repeat (DR) sequence and a spacer sequence. In one embodiment the direct repeat sequence may be located upstream (i.e., 5′) from the guide sequence or spacer sequence. In other embodiments, the direct repeat sequence may be located downstream (i.e., 3′) from the guide sequence or spacer sequence.

[0261] In one embodiment the direct repeat sequence comprises a sequence of one of SEQ ID NOs: 291-293. In one embodiment, the direct repeat sequence includes a single mutation in the poly T stretch. For example, in one embodiment, the direct repeat sequence comprises a sequence selected from SEQ ID NOs: 294-200.

[0262] In one embodiment, each crRNA in the tandem crRNA array comprises a different direct repeat sequence. For example, in one embodiment, nucleotide substitutions within the loop region of the direct repeat, multiple guide-RNAs provides for efficiently generated ordered arrays of crRNAs.

[0263] In one embodiment, the tandem array comprises at least two or more crRNA comprising sequences substantially complementary to a genomic coronavirus RNA sequence and/or a sub-genomic coronavirus RNA sequence. In one embodiment, the tandem array comprises at least two or more crRNA comprising a substantially complementary to a sequence at least 70%, at least 71%, at least 72%, at least 73%, at least 74%, at least 75%, at least 76%, at least 77%, at least 78%, at least 79%, at least 80%, at least 81%, at least 82%, at least 83%, at least 84%, at least 85%, at least 86%, at least 87%, at least 88%, at least 89%, at least 90%, at least 91%, at least 92%, at least 93%, at least 94%, at least 95%, at least 96%, at least 97%, at least 98%, or at least 99% homologous to a sequence selected from SEQ ID NOs: 307-327 or a fragment thereof. In one embodiment, the tandem array comprises at least two or more crRNA comprising a sequence at least 80% homologous to a sequence selected from SEQ ID NOs: 356-391. In one embodiment, the tandem array comprises a sequence at least 70%, at least 71%, at least 72%, at least 73%, at least 74%, at least 75%, at least 76%, at least 77%, at least 78%, at least 79%, at least 80%, at least 81%, at least 82%, at least 83%, at least 84%, at least 85%, at least 86%, at least 87%, at least 88%, at least 89%, at least 90%, at least 91%, at least 92%, at least 93%, at least 94%, at least 95%, at least 96%, at least 97%, at least 98%, or at least 99% homologous to SEQ ID NO:402. In one embodiment, the tandem array comprises a sequence of SEQ ID NO: 402.

[0264] In one embodiment, the tandem array comprises at least two or more crRNA comprising sequences substantially complementary to a genomic coronavirus RNA sequence and/or a sub-genomic coronavirus RNA sequence. In one embodiment, the tandem array comprises at least two or more crRNA comprising a substantially complementary to a sequence at least 70%, at least 71%, at least 72%, at least 73%, at least 74%, at least 75%, at least 76%, at least 77%, at least 78%, at least 79%, at least 80%, at least 81%, at least 82%, at least 83%, at least 84%, at least 85%, at least 86%, at least 87%, at least 88%, at least 89%, at least 90%, at least 91%, at least 92%, at least 93%, at least 94%, at least 95%, at least 96%, at least 97%, at least 98%, or at least 99% homologous to a sequence selected from SEQ ID NOs: 328-347 or a fragment thereof. In one embodiment, the tandem array comprises at least two or more crRNA comprising a sequence at least 70%, at least 71%, at least 72%, at least 73%, at least 74%, at least 75%, at least 76%, at least 77%, at least 78%, at least 79%, at least 80%, at least 81%, at least 82%, at least 83%, at least 84%, at least 85%, at least 86%, at least 87%, at least 88%, at least 89%, at least 90%, at least 91%, at least 92%, at least 93%, at least 94%, at least 95%, at least 96%, at least 97%, at least 98%, or at least 99% homologous homologous to a sequence selected from SEQ ID NOs: 392-401. In one embodiment, the tandem array comprises a sequence at least 70%, at least 71%, at least 72%, at least 73%, at least 74%, at least 75%, at least 76%, at least 77%, at least 78%, at least 79%, at least 80%, at least 81%, at least 82%, at least 83%, at least 84%, at least 85%, at least 86%, at least 87%, at least 88%, at least 89%, at least 90%, at least 91%, at least 92%, at least 93%, at least 94%, at least 95%, at least 96%, at least 97%, at least 98%, or at least 99% homologous to SEQ ID NO: 403 or 404. In one embodiment, the tandem array comprises a sequence of SEQ ID NO: 403 or 404.

### Nucleic Acids

[0265] The isolated nucleic acid sequences of the disclosure can be obtained using any of the many recombinant methods known in the art, such as, for example by screening libraries from cells expressing the gene, by deriving the gene from a vector known to include the same, or by isolating directly from cells and tissues containing the same, using standard techniques. Alternatively, the gene of interest can be produced synthetically, rather than cloned.

[0266] The isolated nucleic acid may comprise any type of nucleic acid, including, but not limited to DNA and RNA. For example, in one embodiment, the composition comprises an isolated DNA molecule, including for example, an isolated cDNA molecule, encoding a protein of the disclosure. In one embodiment, the composition comprises an isolated RNA molecule encoding a protein of the disclosure, or a functional fragment thereof.

[0267] The nucleic acid molecules of the present invention can be modified to improve stability in serum or in growth medium for cell cultures. Modifications can be added to enhance stability, functionality, and/or specificity and to minimize immunostimulatory properties of the nucleic acid molecule of the invention. For example, in order to enhance the stability, the 3′-residues may be stabilized against degradation, e.g., they may be selected such that they consist of purine nucleotides, particularly adenosine or guanosine nucleotides. Alternatively, substitution of pyrimidine nucleotides by modified analogues, e.g., substitution of uridine by 2′-deoxythymidine is tolerated and does not affect function of the molecule.

[0268] In one embodiment of the present invention the nucleic acid molecule may contain at least one modified nucleotide analogue. For example, the ends may be stabilized by incorporating modified nucleotide analogues.

[0269] Non-limiting examples of nucleotide analogues include sugar- and/or backbone-modified ribonucleotides (i.e., include modifications to the phosphate-sugar backbone). For example, the phosphodiester linkages of natural RNA may be modified to include at least one of a nitrogen or sulfur heteroatom. In exemplary backbone-modified ribonucleotides the phosphoester group connecting to adjacent ribonucleotides is replaced by a modified group, e.g., of phosphothioate group. In exemplary sugar-modified ribonucleotides, the 2′ OH-group is replaced by a group selected from H, OR, R, halo, SH, SR, NH₂, NHR, NR₂ or ON, wherein R is C₁-C₆ alkyl, alkenyl or alkynyl and halo is F, Cl, Br or I.

[0270] Other examples of modifications are nucleobase-modified ribonucleotides, i.e., ribonucleotides, containing at least one non-naturally occurring nucleobase instead of a naturally occurring nucleobase. Bases may be modified to block the activity of adenosine deaminase. Exemplary modified nucleobases include, but are not limited to, uridine and/or cytidine modified at the 5-position, e.g., 5-(2-amino)propyl uridine, 5-bromo uridine; adenosine and/or guanosines modified at the 8 position, e.g., 8-bromo guanosine; deaza nucleotides, e.g., 7-deaza-adenosine; O- and N-alkylated nucleotides, e.g., N6-methyl adenosine are suitable. It should be noted that the above modifications may be combined.

[0271] In some instances, the nucleic acid molecule comprises at least one of the following chemical modifications: 2′-H, 2′-O-methyl, or 2′-OH modification of one or more nucleotides. In certain embodiments, a nucleic acid molecule of the invention can have enhanced resistance to nucleases. For increased nuclease resistance, a nucleic acid molecule, can include, for example, 2′-modified ribose units and/or phosphorothioate linkages. For example, the 2′ hydroxyl group (OH) can be modified or replaced with a number of different “oxy” or “deoxy” substituents. For increased nuclease resistance the nucleic acid molecules of the invention can include 2′-O-methyl, 2′-fluorine, 2′-O-methoxyethyl, 2′-O-aminopropyl, 2′-amino, and/or phosphorothioate linkages. Inclusion of locked nucleic acids (LNA), ethylene nucleic acids (ENA), e.g., 2′-4′-ethylene-bridged nucleic acids, and certain nucleobase modifications such as 2-amino-A, 2-thio (e.g., 2-thio-U), G-clamp modifications, can also increase binding affinity to a target. In one embodiment, the nucleic acid molecule includes a 2′-modified nucleotide, e.g., a 2′-deoxy, 2′-deoxy-2′-fluoro, 2′-O-methyl, 2′-O-methoxyethyl (2′-O-MOE), 2′-O-aminopropyl (2′-O-AP), 2′-O-dimethylaminoethyl (2′-O-DMAOE), 2′-O-dimethylaminopropyl (2′-O-DMAP), 2′-O-dimethylaminoethyloxyethyl (2′-O-DMAEOE), or 2′-O—N-methylacetamido (2′-O-NMA). In one embodiment, the nucleic acid molecule includes at least one 2′-O-methyl-modified nucleotide, and in some embodiments, all of the nucleotides of the nucleic acid molecule include a 2′-O-methyl modification.

[0272] In certain embodiments, the nucleic acid molecule of the invention has one or more of the following properties:

[0273] Nucleic acid agents discussed herein include otherwise unmodified RNA and DNA as well as RNA and DNA that have been modified, e.g., to improve efficacy, and polymers of nucleoside surrogates. Unmodified RNA refers to a molecule in which the components of the nucleic acid, namely sugars, bases, and phosphate moieties, are the same or essentially the same as that which occur in nature, or as occur naturally in the human body. The art has referred to rare or unusual, but naturally occurring, RNAs as modified RNAs, see, e.g., Limbach et al. (Nucleic Acids Res., 1994, 22:2183-2196). Such rare or unusual RNAs, often termed modified RNAs, are typically the result of a post-transcriptional modification and are within the term unmodified RNA as used herein. Modified RNA, as used herein, refers to a molecule in which one or more of the components of the nucleic acid, namely sugars, bases, and phosphate moieties, are different from that which occur in nature, or different from that which occurs in the human body. While they are referred to as “modified RNAs” they will of course, because of the modification, include molecules that are not, strictly speaking, RNAs. Nucleoside surrogates are molecules in which the ribophosphate backbone is replaced with a non-ribophosphate construct that allows the bases to be presented in the correct spatial relationship such that hybridization is substantially similar to what is seen with a ribophosphate backbone, e.g., non-charged mimics of the ribophosphate backbone.

[0274] Modifications of the nucleic acid of the invention may be present at one or more of, a phosphate group, a sugar group, backbone, N-terminus, C-terminus, or nucleobase.

[0275] The present invention also includes a vector in which the isolated nucleic acid of the present invention is inserted. The art is replete with suitable vectors that are useful in the present invention.

[0276] In brief summary, the expression of natural or synthetic nucleic acids encoding a protein of the disclosure is typically achieved by operably linking a nucleic acid encoding the protein of the disclosure or portions thereof to a promoter, and incorporating the construct into an expression vector. The vectors to be used are suitable for replication and, optionally, integration in eukaryotic cells. Typical vectors contain transcription and translation terminators, initiation sequences, and promoters useful for regulation of the expression of the desired nucleic acid sequence.

[0277] The vectors of the present invention may also be used for nucleic acid immunization and gene therapy, using standard gene delivery protocols. Methods for gene delivery are known in the art. See, e.g., U.S. Pat. Nos. 5,399,346, 5,580,859, 5,589,466, incorporated by reference herein in their entireties. In another embodiment, the invention provides a gene therapy vector.

[0278] The isolated nucleic acid of the invention can be cloned into a number of types of vectors. For example, the nucleic acid can be cloned into a vector including, but not limited to a plasmid, a phagemid, a phage derivative, an animal virus, and a cosmid. Vectors of particular interest include expression vectors, replication vectors, probe generation vectors, and sequencing vectors.

[0279] Further, the vector may be provided to a cell in the form of a viral vector. Viral vector technology is well known in the art and is described, for example, in Sambrook et al. (2012, Molecular Cloning: A Laboratory Manual, Cold Spring Harbor Laboratory, New York), and in other virology and molecular biology manuals. Viruses, which are useful as vectors include, but are not limited to, retroviruses, adenoviruses, adeno-associated viruses, herpes viruses, and lentiviruses. In general, a suitable vector contains an origin of replication functional in at least one organism, a promoter sequence, convenient restriction endonuclease sites, and one or more selectable markers, (e.g., WO 01/96584; WO 01/29058; and U.S. Pat. No. 6,326,193).

### Delivery Systems and Methods

[0280] In one aspect, the disclosure relates to the development of novel lentiviral packaging and delivery systems. The lentiviral particle delivers the viral enzymes as proteins. In this fashion, lentiviral enzymes are short lived, thus limiting the potential for off-target editing due to long term expression though the entire life of the cell. Thus, in one embodiment, the disclosure provides novel delivery systems for delivering a gene or genetic material.

[0281] The incorporation of editing components, or traditional CRISPR-Cas editing components as proteins in lentiviral particles is advantageous, given that their required activity is only required for a short period of time. Thus, in one embodiment, the disclosure provides a lentiviral delivery system and methods of delivering the compositions of the invention, editing genetic material, and nucleic acid delivery using lentiviral delivery systems.

[0282] In one embodiment, the delivery system comprises (1) a packaging plasmid (2) a transfer plasmid, and (3) an envelope plasmid. In one embodiment, the delivery system comprises (1) a packaging plasmid (2) an envelope plasmid, and (3) a VPR plasmid. In one embodiment, the packaging plasmid comprises a nucleic acid sequence encoding a gag-pol polyprotein. In one embodiment, the gag-pol polyprotein comprises catalytically dead integrase. In one embodiment, the gag-pol polyprotein comprises a mutation selected from D116N and D64V.

[0283] In one embodiment, the transfer plasmid comprises a nucleic acid sequence encoding a crRNA sequence and Cas protein of the disclosure. For example, in one embodiment the transfer plasmid comprises a nucleic acid sequence encoding a crRNA sequence and a protein of the disclosure comprising a Cas protein. In one embodiment, the transfer plasmid comprises a nucleic acid sequence encoding a crRNA sequence and a protein of the disclosure comprising a Cas protein and a localization signal. In one embodiment, the transfer plasmid comprises a nucleic acid sequence encoding a crRNA sequence and a protein of the disclosure comprising a Cas protein and a NLS, NES or other localization signal.

[0284] For example, in one embodiment, the transfer plasmid comprises a nucleic acid sequence encoding a crRNA sequence having substantial complementary to a Coronavirus genomic mRNA sequence or a Coronavirus subgenomic mRNA sequence, and a nucleic acid sequence encoding Cas protein of the disclosure. In one embodiment, the nucleic acid sequence encoding a crRNA sequence having substantial complementary to a Coronavirus genomic mRNA sequence or a Coronavirus subgenomic mRNA sequence comprises a sequence at least 70%, at least 71%, at least 72%, at least 73%, at least 74%, at least 75%, at least 76%, at least 77%, at least 78%, at least 79%, at least 80%, at least 81%, at least 82%, at least 83%, at least 84%, at least 85%, at least 86%, at least 87%, at least 88%, at least 89%, at least 90%, at least 91%, at least 92%, at least 93%, at least 94%, at least 95%, at least 96%, at least 97%, at least 98%, or at least 99% homologous to SEQ ID NOs: 356-391. In one embodiment, nucleic acid sequence encoding Cas protein comprises a sequence encoding an amino acid sequence at least 70%, at least 71%, at least 72%, at least 73%, at least 74%, at least 75%, at least 76%, at least 77%, at least 78%, at least 79%, at least 80%, at least 81%, at least 82%, at least 83%, at least 84%, at least 85%, at least 86%, at least 87%, at least 88%, at least 89%, at least 90%, at least 91%, at least 92%, at least 93%, at least 94%, at least 95%, at least 96%, at least 97%, at least 98%, or at least 99% homologous to one of SEQ ID NOs: 1-46 and 150-171. In one embodiment, nucleic acid sequence encoding Cas protein comprises a sequence at least 70%, at least 71%, at least 72%, at least 73%, at least 74%, at least 75%, at least 76%, at least 77%, at least 78%, at least 79%, at least 80%, at least 81%, at least 82%, at least 83%, at least 84%, at least 85%, at least 86%, at least 87%, at least 88%, at least 89%, at least 90%, at least 91%, at least 92%, at least 93%, at least 94%, at least 95%, at least 96%, at least 97%, at least 98%, or at least 99% homologous to one of SEQ ID NOs: 188-190 and 271-290. In one embodiment, the transfer plasmid comprises a sequence of SEQ ID NO:405-407.

[0285] In one embodiment, the transfer plasmid comprises a nucleic acid sequence encoding a crRNA sequence having substantial complementary to an influenza virus genomic mRNA sequence or a subgenomic mRNA sequence, and a nucleic acid sequence encoding Cas protein of the disclosure. In one embodiment, the nucleic acid sequence encoding a crRNA sequence having substantial complementary to influenza virus genomic mRNA sequence or a subgenomic mRNA sequence encodes a sequence comprising a sequence at least 70%, at least 71%, at least 72%, at least 73%, at least 74%, at least 75%, at least 76%, at least 77%, at least 78%, at least 79%, at least 80%, at least 81%, at least 82%, at least 83%, at least 84%, at least 85%, at least 86%, at least 87%, at least 88%, at least 89%, at least 90%, at least 91%, at least 92%, at least 93%, at least 94%, at least 95%, at least 96%, at least 97%, at least 98%, or at least 99% homologous to SEQ ID NOs: 392-401. In one embodiment, nucleic acid sequence encoding Cas protein comprises a sequence encoding an amino acid sequence at least 70%, at least 71%, at least 72%, at least 73%, at least 74%, at least 75%, at least 76%, at least 77%, at least 78%, at least 79%, at least 80%, at least 81%, at least 82%, at least 83%, at least 84%, at least 85%, at least 86%, at least 87%, at least 88%, at least 89%, at least 90%, at least 91%, at least 92%, at least 93%, at least 94%, at least 95%, at least 96%, at least 97%, at least 98%, or at least 99% homologous to one of SEQ ID NOs: 1-46 and 150-171. In one embodiment, nucleic acid sequence encoding Cas protein comprises a sequence at least 70%, at least 71%, at least 72%, at least 73%, at least 74%, at least 75%, at least 76%, at least 77%, at least 78%, at least 79%, at least 80%, at least 81%, at least 82%, at least 83%, at least 84%, at least 85%, at least 86%, at least 87%, at least 88%, at least 89%, at least 90%, at least 91%, at least 92%, at least 93%, at least 94%, at least 95%, at least 96%, at least 97%, at least 98%, or at least 99% homologous to one of SEQ ID NOs: 188-190 and 271-290.

[0286] In one embodiment, the transfer plasmid comprises a nucleic acid sequence encoding a crRNA sequence and a fusion protein of the disclosure comprising a Cas protein and a fluorescent protein. In one embodiment, the transfer plasmid comprises a nucleic acid sequence encoding a crRNA sequence and a protein of the disclosure comprising a Cas protein, a fluorescent protein and a localization signal. In one embodiment, the transfer plasmid comprises a nucleic acid sequence encoding a crRNA sequence and a protein of the disclosure comprising a Cas protein, a fluorescent protein, and a NLS, NES or other localization signal.

[0287] In one embodiment, the transfer plasmid comprises a nucleic acid sequence encoding a crRNA array sequence and Cas protein of the disclosure. For example, in one embodiment the transfer plasmid comprises a nucleic acid sequence encoding a crRNA array sequence and a protein of the disclosure comprising a Cas protein. In one embodiment, the transfer plasmid comprises a nucleic acid sequence encoding a crRNA array sequence and a protein of the disclosure comprising a Cas protein and a localization signal. In one embodiment, the transfer plasmid comprises a nucleic acid sequence encoding a crRNA array sequence and a protein of the disclosure comprising a Cas protein and a NLS, NES or other localization signal.

[0288] For example, in one embodiment, the transfer plasmid comprises a nucleic acid sequence encoding a tandem array comprising two or more crRNA sequence having substantial complementary to a Coronavirus genomic mRNA sequence or a Coronavirus subgenomic mRNA sequence, and a nucleic acid sequence encoding Cas protein of the disclosure. In one embodiment, the nucleic acid sequence encoding a tandem array comprises a sequence encoding a sequence at least 70%, at least 71%, at least 72%, at least 73%, at least 74%, at least 75%, at least 76%, at least 77%, at least 78%, at least 79%, at least 80%, at least 81%, at least 82%, at least 83%, at least 84%, at least 85%, at least 86%, at least 87%, at least 88%, at least 89%, at least 90%, at least 91%, at least 92%, at least 93%, at least 94%, at least 95%, at least 96%, at least 97%, at least 98%, or at least 99% homologous to SEQ ID NO:402. In one embodiment, nucleic acid sequence encoding Cas protein comprises a sequence encoding an amino acid sequence at least 70%, at least 71%, at least 72%, at least 73%, at least 74%, at least 75%, at least 76%, at least 77%, at least 78%, at least 79%, at least 80%, at least 81%, at least 82%, at least 83%, at least 84%, at least 85%, at least 86%, at least 87%, at least 88%, at least 89%, at least 90%, at least 91%, at least 92%, at least 93%, at least 94%, at least 95%, at least 96%, at least 97%, at least 98%, or at least 99% homologous to one of SEQ ID NOs: 1-46 and 150-171. In one embodiment, nucleic acid sequence encoding Cas protein comprises a sequence at least 70%, at least 71%, at least 72%, at least 73%, at least 74%, at least 75%, at least 76%, at least 77%, at least 78%, at least 79%, at least 80%, at least 81%, at least 82%, at least 83%, at least 84%, at least 85%, at least 86%, at least 87%, at least 88%, at least 89%, at least 90%, at least 91%, at least 92%, at least 93%, at least 94%, at least 95%, at least 96%, at least 97%, at least 98%, or at least 99% homologous to one of SEQ ID NOs: 188-190 and 271-290. In one embodiment, the transfer plasmid comprises a sequence of SEQ ID NO:396.

[0289] In one embodiment, the transfer plasmid comprises a nucleic acid sequence encoding a tandem array comprising two or more crRNA sequence having substantial complementary to an influenza virus genomic mRNA sequence or a subgenomic mRNA sequence, and a nucleic acid sequence encoding Cas protein of the disclosure. In one embodiment, the nucleic acid sequence encoding a tandem array comprises a sequence encoding a sequence at least 70%, at least 71%, at least 72%, at least 73%, at least 74%, at least 75%, at least 76%, at least 77%, at least 78%, at least 79%, at least 80%, at least 81%, at least 82%, at least 83%, at least 84%, at least 85%, at least 86%, at least 87%, at least 88%, at least 89%, at least 90%, at least 91%, at least 92%, at least 93%, at least 94%, at least 95%, at least 96%, at least 97%, at least 98%, or at least 99% homologous to SEQ ID NO:403 or 404. In one embodiment, nucleic acid sequence encoding Cas protein comprises a sequence encoding an amino acid sequence at least 80% homologous to one of SEQ ID NOs: 1-46 and 150-171. In one embodiment, nucleic acid sequence encoding Cas protein comprises a sequence at least 70%, at least 71%, at least 72%, at least 73%, at least 74%, at least 75%, at least 76%, at least 77%, at least 78%, at least 79%, at least 80%, at least 81%, at least 82%, at least 83%, at least 84%, at least 85%, at least 86%, at least 87%, at least 88%, at least 89%, at least 90%, at least 91%, at least 92%, at least 93%, at least 94%, at least 95%, at least 96%, at least 97%, at least 98%, or at least 99% homologous to one of SEQ ID NOs: 188-190 and 271-290.

[0290] In one embodiment, the transfer plasmid comprises a nucleic acid sequence encoding a crRNA array sequence and a fusion protein of the disclosure comprising a Cas protein and a fluorescent protein. In one embodiment, the transfer plasmid comprises a nucleic acid sequence encoding a crRNA array sequence and a protein of the disclosure comprising a Cas protein, a fluorescent protein and a localization signal. In one embodiment, the transfer plasmid comprises a nucleic acid sequence encoding a crRNA array sequence and a protein of the disclosure comprising a Cas protein, a fluorescent protein, and a NLS, NES or other localization signal.

[0291] In one embodiment, the transfer plasmid comprises a nucleic acid sequence encoding a gene. For example, in one embodiment the transfer plasmid comprises a nucleic acid sequence encoding a therapeutic gene. In some embodiments, the gene is a wild-type gene.

[0292] In one embodiment, the envelope plasmid comprises a nucleic acid sequence encoding an envelope protein. In one embodiment, the envelope protein can be selected based on the desired cell type. In one embodiment, the envelope plasmid comprises a nucleic acid sequence encoding an HIV envelope protein. In one embodiment, the envelope plasmid comprises a nucleic acid sequence encoding a vesicular stomatitis virus g-protein (VSV-g) envelope protein. In one embodiment, the envelope plasmid comprises a nucleic acid sequence encoding an amino acid sequence at least 70%, at least 71%, at least 72%, at least 73%, at least 74%, at least 75%, at least 76%, at least 77%, at least 78%, at least 79%, at least 80%, at least 81%, at least 82%, at least 83%, at least 84%, at least 85%, at least 86%, at least 87%, at least 88%, at least 89%, at least 90%, at least 91%, at least 92%, at least 93%, at least 94%, at least 95%, at least 96%, at least 97%, at least 98%, or at least 99% homologous to one of SEQ ID NOs:184. In one embodiment, the envelope plasmid comprises a nucleic acid sequence encoding an amino acid sequence of one of SEQ ID NOs:184.

[0293] In one embodiment, the envelope plasmid comprises a nucleic acid sequence encoding a coronavirus spike protein or a coronavirus spike protein-derived protein. For example in one embodiment, the envelope plasmid comprises a nucleic acid sequence encoding an amino acid sequence at least 70%, at least 71%, at least 72%, at least 73%, at least 74%, at least 75%, at least 76%, at least 77%, at least 78%, at least 79%, at least 80%, at least 81%, at least 82%, at least 83%, at least 84%, at least 85%, at least 86%, at least 87%, at least 88%, at least 89%, at least 90%, at least 91%, at least 92%, at least 93%, at least 94%, at least 95%, at least 96%, at least 97%, at least 98%, or at least 99% homologous to one of SEQ ID NOs:172-183. In one embodiment, the envelope plasmid comprises a nucleic acid sequence encoding an amino acid sequence of one of SEQ ID NOs:172-183.

[0294] In one embodiment, viral envelope proteins from coronaviruses are not efficient for pseudotyping of lentiviral vectors. Thus, in one embodiment, the disclosure also provides novel coronavirus envelope proteins for use in pseudotyping a lentiviral vector. In one embodiment, the coronavirus envelope protein comprises an amino acid sequence at least 70%, at least 71%, at least 72%, at least 73%, at least 74%, at least 75%, at least 76%, at least 77%, at least 78%, at least 79%, at least 80%, at least 81%, at least 82%, at least 83%, at least 84%, at least 85%, at least 86%, at least 87%, at least 88%, at least 89%, at least 90%, at least 91%, at least 92%, at least 93%, at least 94%, at least 95%, at least 96%, at least 97%, at least 98%, or at least 99% homologous to one of SEQ ID NOs:172-183. In one embodiment, the coronavirus envelope protein comprises an amino acid sequence of one of SEQ ID NOs:172-183.

[0295] In one embodiment, the VPR plasmid comprises a nucleic acid sequence encoding a fusion protein comprising VPR, and a Cas protein of the disclosure. In one embodiment, the VPR plasmid comprises a nucleic acid sequence encoding a fusion protein comprising VPR, and a protein of the disclosure comprising a Cas protein and a fluorescent protein.

[0296] In one embodiment, the packaging plasmid, transfer plasmid, and envelope plasmid are introduced into a cell. In one embodiment, the cell transcribes and translates the nucleic acid sequence encoding the gag-pol protein encoded by the packaging plasmid to produce the gag-pol polyprotein. In one embodiment, the cell transcribes and translates the nucleic acid sequence encoding the envelope protein of the envelope plasmid to produce the envelope protein. In one embodiment, the cell transcribes the nucleic acid sequence encoding the crRNA sequence or crRNA array of the transfer plasmid to produce the crRNA or crRNA array. In one embodiment, the cell transcribes and translates the nucleic acid sequence encoding the Cas protein or Cas protein and fluorescent protein of the transfer plasmid to produce the Cas or Cas fusion protein.

[0297] In one embodiment, the transcribed transfer plasmid and gag-pol proteins are packaged into a lentiviral vector. In one embodiment, the lentiviral vectors are collected from the cell media. In one embodiment, the viral particles transduce a target cell, wherein the transcribed the crRNA and Cas protein are cleaved and the translated thereby generating the Cas protein and crRNA, wherein the crRNA binds to the Cas protein and directs it to an RNA having a sequence substantially complementary to the crRNA sequence.

[0298] In one embodiment, the packaging plasmid, transfer plasmid, and envelope plasmid are introduced into a cell. In one embodiment, the cell transcribes and translates the nucleic acid sequence encoding the gag-pol protein encoded by the packaging plasmid to produce the gag-pol polyprotein. In one embodiment, the cell transcribes and translates the nucleic acid sequence encoding the envelope protein of the envelope plasmid to produce the envelope protein. In one embodiment, the cell transcribes the nucleic acid sequence encoding the gene to produce the gene. In one embodiment, the cell transcribes and translates the nucleic acid sequence encoding the gene of the transfer plasmid to produce a protein.

[0299] In one embodiment, the transcribed transfer plasmid and gag-pol proteins are packaged into a lentiviral vector. In one embodiment, the lentiviral vectors are collected from the cell media. In one embodiment, the viral particles transduce a target cell, wherein the transcribed gene is delivered to the cell and inserted into the genome.

[0300] In one embodiment, the transcribed transfer plasmid and gag-pol proteins are packaged into a lentiviral vector. In one embodiment, the lentiviral vectors are collected from the cell media. In one embodiment, the viral particles transduce a target cell, wherein the transcribed and translated gene is delivered to the cell.

[0301] In one embodiment, the gene or protein is delivered to a respiratory, vascular, renal, or cardiovascular cell type. Thus, in one embodiment the envelope protein is derived from a coronavirus. In one embodiment, the coronavirus envelope protein comprises an amino acid sequence at least 70%, at least 71%, at least 72%, at least 73%, at least 74%, at least 75%, at least 76%, at least 77%, at least 78%, at least 79%, at least 80%, at least 81%, at least 82%, at least 83%, at least 84%, at least 85%, at least 86%, at least 87%, at least 88%, at least 89%, at least 90%, at least 91%, at least 92%, at least 93%, at least 94%, at least 95%, at least 96%, at least 97%, at least 98%, or at least 99% homologous to one of SEQ ID NOs:172-183. In one embodiment, the coronavirus envelope protein comprises an amino acid sequence of one of SEQ ID NOs:172-183.

[0302] Further, a number of additional viral based systems have been developed for gene transfer into mammalian cells. For example, retroviruses provide a convenient platform for gene delivery systems. A selected gene can be inserted into a vector and packaged in retroviral particles using techniques known in the art. The recombinant virus can then be isolated and delivered to cells of the subject either in vivo or ex vivo. A number of retroviral systems are known in the art. In some embodiments, adenovirus vectors are used. A number of adenovirus vectors are known in the art. In one embodiment, lentivirus vectors are used.

[0303] For example, vectors derived from retroviruses such as the lentivirus are suitable tools to achieve long-term gene transfer since they allow long-term, stable integration of a transgene and its propagation in daughter cells. Lentiviral vectors have the added advantage over vectors derived from onco-retroviruses such as murine leukemia viruses in that they can transduce non-proliferating cells, such as hepatocytes. They also have the added advantage of low immunogenicity.

[0304] In one embodiment, the composition includes a vector derived from an adeno-associated virus (AAV). The term “AAV vector” means a vector derived from an adeno-associated virus serotype, including without limitation, AAV-1, AAV-2, AAV-3, AAV-4, AAV-5, AAV-6, AAV-7, AAV-8, and AAV-9. AAV vectors have become powerful gene delivery tools for the treatment of various disorders. AAV vectors possess a number of features that render them ideally suited for gene therapy, including a lack of pathogenicity, minimal immunogenicity, and the ability to transduce postmitotic cells in a stable and efficient manner. Expression of a particular gene contained within an AAV vector can be specifically targeted to one or more types of cells by choosing the appropriate combination of AAV serotype, promoter, and delivery method.

[0305] For example, in one embodiment, the AAV vector comprises a crRNA having substantially complementary to a Coronavirus genomic mRNA sequence or a Coronavirus subgenomic mRNA sequence. In one embodiment, the AAV vector comprises a crRNA array comprising two or more crRNA having substantially complementary to a Coronavirus genomic mRNA sequence or a Coronavirus subgenomic mRNA sequence. In one embodiment, the AAV vector comprises a sequence at least 70%, at least 71%, at least 72%, at least 73%, at least 74%, at least 75%, at least 76%, at least 77%, at least 78%, at least 79%, at least 80%, at least 81%, at least 82%, at least 83%, at least 84%, at least 85%, at least 86%, at least 87%, at least 88%, at least 89%, at least 90%, at least 91%, at least 92%, at least 93%, at least 94%, at least 95%, at least 96%, at least 97%, at least 98%, or at least 99% homologous to SEQ ID NO: 409. In one embodiment, the transfer plasmid comprises a sequence of SEQ ID NO: 409.

[0306] In one embodiment, the AAV vector comprises a crRNA having substantially complementary to an influenza virus genomic RNA sequence or an influenza virus subgenomic RNA sequence. In one embodiment, the transfer plasmid comprises a crRNA array comprising two or more crRNA having substantially complementary to an influenza virus genomic RNA sequence or an influenza virus subgenomic RNA sequence.

[0307] AAV vectors can have one or more of the AAV wild-type genes deleted in whole or part, preferably the rep and/or cap genes, but retain functional flanking ITR sequences. Despite the high degree of homology, the different serotypes have tropisms for different tissues. The receptor for AAV1 is unknown; however, AAV1 is known to transduce skeletal and cardiac muscle more efficiently than AAV2. Since most of the studies have been done with pseudotyped vectors in which the vector DNA flanked with AAV2 ITR is packaged into capsids of alternate serotypes, it is clear that the biological differences are related to the capsid rather than to the genomes. Recent evidence indicates that DNA expression cassettes packaged in AAV 1 capsids are at least 1 log 10 more efficient at transducing cardiomyocytes than those packaged in AAV2 capsids. In one embodiment, the viral delivery system is an adeno-associated viral delivery system. The adeno-associated virus can be of serotype 1 (AAV 1), serotype 2 (AAV2), serotype 3 (AAV3), serotype 4 (AAV4), serotype 5 (AAV5), serotype 6 (AAV6), serotype 7 (AAV7), serotype 8 (AAV8), or serotype 9 (AAV9).

[0308] Desirable AAV fragments for assembly into vectors include the cap proteins, including the vp1, vp2, vp3 and hypervariable regions, the rep proteins, including rep 78, rep 68, rep 52, and rep 40, and the sequences encoding these proteins. These fragments may be readily utilized in a variety of vector systems and host cells. Such fragments may be used alone, in combination with other AAV serotype sequences or fragments, or in combination with elements from other AAV or non-AAV viral sequences. As used herein, artificial AAV serotypes include, without limitation, AAV with a non-naturally occurring capsid protein. Such an artificial capsid may be generated by any suitable technique, using a selected AAV sequence (e.g., a fragment of a vp1 capsid protein) in combination with heterologous sequences which may be obtained from a different selected AAV serotype, non-contiguous portions of the same AAV serotype, from a non-AAV viral source, or from a non-viral source. An artificial AAV serotype may be, without limitation, a chimeric AAV capsid, a recombinant AAV capsid, or a “humanized” AAV capsid. Thus exemplary AAVs, or artificial AAVs, suitable for expression of one or more proteins, include AAV2/8 (see U.S. Pat. No. 7,282,199), AAV2/5 (available from the National Institutes of Health), AAV2/9 (International Patent Publication No. WO2005/033321), AAV2/6 (U.S. Pat. No. 6,156,303), and AAVrh8 (International Patent Publication No. WO2003/042397), among others.

[0309] In certain embodiments, the vector also includes conventional control elements which are operably linked to the transgene in a manner which permits its transcription, translation and/or expression in a cell transfected with the plasmid vector or infected with the virus produced by the invention. As used herein, “operably linked” sequences include both expression control sequences that are contiguous with the gene of interest and expression control sequences that act in trans or at a distance to control the gene of interest. Expression control sequences include appropriate transcription initiation, termination, promoter and enhancer sequences; efficient RNA processing signals such as splicing and polyadenylation (polyA) signals; sequences that stabilize cytoplasmic mRNA; sequences that enhance translation efficiency (i.e., Kozak consensus sequence); sequences that enhance protein stability; and when desired, sequences that enhance secretion of the encoded product. A great number of expression control sequences, including promoters which are native, constitutive, inducible and/or tissue-specific, are known in the art and may be utilized.

[0310] Additional promoter elements, e.g., enhancers, regulate the frequency of transcriptional initiation. Typically, these are located in the region 30-110 bp upstream of the start site, although a number of promoters have recently been shown to contain functional elements downstream of the start site as well. The spacing between promoter elements frequently is flexible, so that promoter function is preserved when elements are inverted or moved relative to one another. In the thymidine kinase (tk) promoter, the spacing between promoter elements can be increased to 50 bp apart before activity begins to decline. Depending on the promoter, it appears that individual elements can function either cooperatively or independently to activate transcription.

[0311] One example of a suitable promoter is the immediate early cytomegalovirus (CMV) promoter sequence. This promoter sequence is a strong constitutive promoter sequence capable of driving high levels of expression of any polynucleotide sequence operatively linked thereto. Another example of a suitable promoter is Elongation Growth Factor-1α (EF-1α). However, other constitutive promoter sequences may also be used, including, but not limited to the simian virus 40 (SV40) early promoter, mouse mammary tumor virus (MMTV), human immunodeficiency virus (HIV) long terminal repeat (LTR) promoter, MoMuLV promoter, an avian leukemia virus promoter, an Epstein-Barr virus immediate early promoter, a Rous sarcoma virus promoter, as well as human gene promoters such as, but not limited to, the actin promoter, the myosin promoter, the hemoglobin promoter, and the creatine kinase promoter. Further, the invention should not be limited to the use of constitutive promoters. Inducible promoters are also contemplated as part of the invention. The use of an inducible promoter provides a molecular switch capable of turning on expression of the polynucleotide sequence which it is operatively linked when such expression is desired, or turning off the expression when expression is not desired. Examples of inducible promoters include, but are not limited to a metallothionine promoter, a glucocorticoid promoter, a progesterone promoter, and a tetracycline promoter.

[0312] Enhancer sequences found on a vector also regulates expression of the gene contained therein. Typically, enhancers are bound with protein factors to enhance the transcription of a gene. Enhancers may be located upstream or downstream of the gene it regulates. Enhancers may also be tissue-specific to enhance transcription in a specific cell or tissue type. In one embodiment, the vector of the present invention comprises one or more enhancers to boost transcription of the gene present within the vector.

[0313] In order to assess the expression of a fusion protein of the invention, the expression vector to be introduced into a cell can also contain either a selectable marker gene or a reporter gene or both to facilitate identification and selection of expressing cells from the population of cells sought to be transfected or infected through viral vectors. In other aspects, the selectable marker may be carried on a separate piece of DNA and used in a co-transfection procedure. Both selectable markers and reporter genes may be flanked with appropriate regulatory sequences to enable expression in the host cells. Useful selectable markers include, for example, antibiotic-resistance genes, such as neo and the like.

[0314] Reporter genes are used for identifying potentially transfected cells and for evaluating the functionality of regulatory sequences. In general, a reporter gene is a gene that is not present in or expressed by the recipient organism or tissue and that encodes a polypeptide whose expression is manifested by some easily detectable property, e.g., enzymatic activity. Expression of the reporter gene is assayed at a suitable time after the DNA has been introduced into the recipient cells. Suitable reporter genes may include genes encoding luciferase, beta-galactosidase, chloramphenicol acetyl transferase, secreted alkaline phosphatase, or the green fluorescent protein gene (e.g., Ui-Tei et al., 2000 FEBS Letters 479: 79-82). Suitable expression systems are well known and may be prepared using known techniques or obtained commercially. In general, the construct with the minimal 5′ flanking region showing the highest level of expression of reporter gene is identified as the promoter. Such promoter regions may be linked to a reporter gene and used to evaluate agents for the ability to modulate promoter-driven transcription.

[0315] Methods of introducing and expressing genes into a cell are known in the art. In the context of an expression vector, the vector can be readily introduced into a host cell, e.g., mammalian, bacterial, yeast, or insect cell by any method in the art. For example, the expression vector can be transferred into a host cell by physical, chemical, or biological means.

[0316] Physical methods for introducing a polynucleotide into a host cell include calcium phosphate precipitation, lipofection, particle bombardment, microinjection, electroporation, and the like. Methods for producing cells comprising vectors and/or exogenous nucleic acids are well-known in the art. See, for example, Sambrook et al. (2012, Molecular Cloning: A Laboratory Manual, Cold Spring Harbor Laboratory, New York). An exemplary method for the introduction of a polynucleotide into a host cell is calcium phosphate transfection.

[0317] Biological methods for introducing a polynucleotide of interest into a host cell include the use of DNA and RNA vectors. Viral vectors, and especially retroviral vectors, have become the most widely used method for inserting genes into mammalian, e.g., human cells. Other viral vectors can be derived from lentivirus, poxviruses, herpes simplex virus I, adenoviruses and adeno-associated viruses, and the like. See, for example, U.S. Pat. Nos. 5,350,674 and 5,585,362.

[0318] Chemical means for introducing a polynucleotide into a host cell include colloidal dispersion systems, such as macromolecule complexes, nanocapsules, microspheres, beads, and lipid-based systems including oil-in-water emulsions, micelles, mixed micelles, and liposomes. An exemplary colloidal system for use as a delivery vehicle in vitro and in vivo is a liposome (e.g., an artificial membrane vesicle).

[0319] In the case where a non-viral delivery system is utilized, an exemplary delivery vehicle is a liposome. The use of lipid formulations is contemplated for the introduction of the nucleic acids into a host cell (in vitro, ex vivo or in vivo). In another aspect, the nucleic acid may be associated with a lipid. The nucleic acid associated with a lipid may be encapsulated in the aqueous interior of a liposome, interspersed within the lipid bilayer of a liposome, attached to a liposome via a linking molecule that is associated with both the liposome and the oligonucleotide, entrapped in a liposome, complexed with a liposome, dispersed in a solution containing a lipid, mixed with a lipid, combined with a lipid, contained as a suspension in a lipid, contained or complexed with a micelle, or otherwise associated with a lipid. Lipid, lipid/DNA or lipid/expression vector associated compositions are not limited to any particular structure in solution. For example, they may be present in a bilayer structure, as micelles, or with a “collapsed” structure. They may also simply be interspersed in a solution, possibly forming aggregates that are not uniform in size or shape. Lipids are fatty substances which may be naturally occurring or synthetic lipids. For example, lipids include the fatty droplets that naturally occur in the cytoplasm as well as the class of compounds which contain long-chain aliphatic hydrocarbons and their derivatives, such as fatty acids, alcohols, amines, amino alcohols, and aldehydes.

[0320] Lipids suitable for use can be obtained from commercial sources. For example, dimyristyl phosphatidylcholine (“DMPC”) can be obtained from Sigma, St. Louis, Mo.; dicetyl phosphate (“DCP”) can be obtained from K & K Laboratories (Plainview, N.Y.); cholesterol (“Choi”) can be obtained from Calbiochem-Behring; dimyristyl phosphatidylglycerol (“DMPG”) and other lipids may be obtained from Avanti Polar Lipids, Inc. (Birmingham, Ala.). Stock solutions of lipids in chloroform or chloroform/methanol can be stored at about −20° C. Chloroform is used as the only solvent since it is more readily evaporated than methanol. “Liposome” is a generic term encompassing a variety of single and multilamellar lipid vehicles formed by the generation of enclosed lipid bilayers or aggregates. Liposomes can be characterized as having vesicular structures with a phospholipid bilayer membrane and an inner aqueous medium. Multilamellar liposomes have multiple lipid layers separated by aqueous medium. They form spontaneously when phospholipids are suspended in an excess of aqueous solution. The lipid components undergo self-rearrangement before the formation of closed structures and entrap water and dissolved solutes between the lipid bilayers (Ghosh et al., 1991 Glycobiology 5: 505-10). However, compositions that have different structures in solution than the normal vesicular structure are also encompassed. For example, the lipids may assume a micellar structure or merely exist as nonuniform aggregates of lipid molecules. Also contemplated are lipofectamine-nucleic acid complexes.

[0321] Regardless of the method used to introduce exogenous nucleic acids into a host cell, in order to confirm the presence of the recombinant DNA sequence in the host cell, a variety of assays may be performed. Such assays include, for example, “molecular biological” assays well known to those of skill in the art, such as Southern and Northern blotting, RT-PCR and PCR; “biochemical” assays, such as detecting the presence or absence of a particular peptide, e.g., by immunological means (ELISAs and Western blots) or by assays described herein to identify agents falling within the scope of the invention.

### Systems

[0322] In one aspect, the present invention provides a system for decreasing the number of an RNA transcript in a subject. In one embodiment the system comprises, in one or more vectors, a nucleic acid sequence encoding a protein, wherein the protein comprises a CRISPR-associated (Cas) protein, and optionally a localization sequence, such as an NLS, NES, or organelle localization signal; and a nucleic acid sequence encoding a crRNA. In one embodiment, the crRNA substantially hybridizes to a target RNA sequence in the RNA transcript. In one embodiment, the nucleic acid sequence encoding the Cas and the nucleic acid sequence encoding a crRNA are in the same vector. In one embodiment, the nucleic acid sequence encoding the protein and the nucleic acid sequence encoding a crRNA are in different vectors.

[0323] In one embodiment, the nucleic acid sequence encoding a protein comprises (1) a nucleic acid sequence encoding an amino acid sequence at least 70%, at least 71%, at least 72%, at least 73%, at least 74%, at least 75%, at least 76%, at least 77%, at least 78%, at least 79%, at least 80%, at least 81%, at least 82%, at least 83%, at least 84%, at least 85%, at least 86%, at least 87%, at least 88%, at least 89%, at least 90%, at least 91%, at least 92%, at least 93%, at least 94%, at least 95%, at least 96%, at least 97%, at least 98%, or at least 99% identical to one of SEQ ID NOs: 1-46; and (2) optionally a nucleic acid sequence encoding an amino acid sequence at least 70%, at least 71%, at least 72%, at least 73%, at least 74%, at least 75%, at least 76%, at least 77%, at least 78%, at least 79%, at least 80%, at least 81%, at least 82%, at least 83%, at least 84%, at least 85%, at least 86%, at least 87%, at least 88%, at least 89%, at least 90%, at least 91%, at least 92%, at least 93%, at least 94%, at least 95%, at least 96%, at least 97%, at least 98%, or at least 99% identical to one of SEQ ID NOs: 67-83 and 427-1039. In one embodiment, the nucleic acid sequence encoding a protein comprises (1) a nucleic acid sequence encoding an amino acid of one of SEQ ID NOs: 1-46; and (2) optionally a nucleic acid sequence encoding an amino acid of one of SEQ ID NOs: 67-83 and 427-1039. In one embodiment, the nucleic acid sequence encoding a protein comprises a nucleic acid sequence encoding an amino acid at least 70%, at least 71%, at least 72%, at least 73%, at least 74%, at least 75%, at least 76%, at least 77%, at least 78%, at least 79%, at least 80%, at least 81%, at least 82%, at least 83%, at least 84%, at least 85%, at least 86%, at least 87%, at least 88%, at least 89%, at least 90%, at least 91%, at least 92%, at least 93%, at least 94%, at least 95%, at least 96%, at least 97%, at least 98%, or at least 99% identical to one of SEQ ID NOs: 150-171. In one embodiment, the nucleic acid sequence encoding a protein comprises a nucleic acid sequence encoding an amino acid of one of SEQ ID NOs: 150-171.

[0324] In one aspect, the present invention provides a system for visualizing an RNA transcript in a subject. In one embodiment the system comprises, in one or more vectors, a nucleic acid sequence encoding a fusion protein, wherein the fusion protein comprises a CRISPR-associated (Cas) protein, a fluorescent protein, and optionally a localization sequence, such as an NLS, NES, or organelle localization signal; and a nucleic acid sequence encoding a crRNA. In one embodiment, the crRNA substantially hybridizes to a target RNA sequence in the RNA transcript. In one embodiment, the nucleic acid sequence encoding the Cas and the nucleic acid sequence encoding a crRNA are in the same vector. In one embodiment, the nucleic acid sequence encoding the fusion protein and the nucleic acid sequence encoding a crRNA are in different vectors.

[0325] In one embodiment, the nucleic acid sequence encoding a fusion protein comprises (1) a nucleic acid sequence encoding an amino acid sequence at least 70%, at least 71%, at least 72%, at least 73%, at least 74%, at least 75%, at least 76%, at least 77%, at least 78%, at least 79%, at least 80%, at least 81%, at least 82%, at least 83%, at least 84%, at least 85%, at least 86%, at least 87%, at least 88%, at least 89%, at least 90%, at least 91%, at least 92%, at least 93%, at least 94%, at least 95%, at least 96%, at least 97%, at least 98%, or at least 99% identical to one of SEQ ID NOs: 47-48; (2) a nucleic acid sequence encoding an amino acid sequence at least 70%, at least 71%, at least 72%, at least 73%, at least 74%, at least 75%, at least 76%, at least 77%, at least 78%, at least 79%, at least 80%, at least 81%, at least 82%, at least 83%, at least 84%, at least 85%, at least 86%, at least 87%, at least 88%, at least 89%, at least 90%, at least 91%, at least 92%, at least 93%, at least 94%, at least 95%, at least 96%, at least 97%, at least 98%, or at least 99% identical to one of SEQ ID NOs: 49-56; and (3) optionally a nucleic acid sequence encoding an amino acid sequence at least 70%, at least 71%, at least 72%, at least 73%, at least 74%, at least 75%, at least 76%, at least 77%, at least 78%, at least 79%, at least 80%, at least 81%, at least 82%, at least 83%, at least 84%, at least 85%, at least 86%, at least 87%, at least 88%, at least 89%, at least 90%, at least 91%, at least 92%, at least 93%, at least 94%, at least 95%, at least 96%, at least 97%, at least 98%, or at least 99% identical to one of SEQ ID NOs: 67-83 and 427-1039. In one embodiment, the nucleic acid sequence encoding a fusion protein comprises (1) a nucleic acid sequence encoding an amino acid of one of SEQ ID NOs: 47-48; (2) a nucleic acid sequence encoding an amino acid of one of SEQ ID NOs: 49-56; and (3) a nucleic acid sequence encoding an amino acid of one of SEQ ID NOs: 67-83 and 427-1039. In one embodiment, the nucleic acid sequence encoding a protein comprises a nucleic acid sequence encoding an amino acid at least 70%, at least 71%, at least 72%, at least 73%, at least 74%, at least 75%, at least 76%, at least 77%, at least 78%, at least 79%, at least 80%, at least 81%, at least 82%, at least 83%, at least 84%, at least 85%, at least 86%, at least 87%, at least 88%, at least 89%, at least 90%, at least 91%, at least 92%, at least 93%, at least 94%, at least 95%, at least 96%, at least 97%, at least 98%, or at least 99% identical to one of SEQ ID NOs: 84-149. In one embodiment, the nucleic acid sequence encoding a protein comprises a nucleic acid sequence encoding an amino acid of one of SEQ ID NOs: 84-149.

### Compositions and Formulations

[0326] In one aspect, the present invention provides compositions for decreasing the number of an RNA transcript in a subject. In one embodiment, the composition comprises a fusion protein, wherein the fusion protein comprises a CRISPR-associated (Cas) protein, and optionally a localization sequence, such as an NLS, NES or organelle localization signal. In one embodiment, the composition comprises a crRNA. In one embodiment, the crRNA substantially hybridizes to a target RNA sequence in the RNA transcript. In one embodiment, the composition comprises a crRNA array. In one embodiment, the crRNA array comprises two or more sequences which substantially hybridizes to a target RNA sequence in the RNA transcript.

[0327] In one embodiment, the composition comprises a protein comprising (1) an amino acid sequence at least 70%, at least 71%, at least 72%, at least 73%, at least 74%, at least 75%, at least 76%, at least 77%, at least 78%, at least 79%, at least 80%, at least 81%, at least 82%, at least 83%, at least 84%, at least 85%, at least 86%, at least 87%, at least 88%, at least 89%, at least 90%, at least 91%, at least 92%, at least 93%, at least 94%, at least 95%, at least 96%, at least 97%, at least 98%, or at least 99% identical to one of SEQ ID NOs: 1-46; and (2) optionally an amino acid sequence at least 70%, at least 71%, at least 72%, at least 73%, at least 74%, at least 75%, at least 76%, at least 77%, at least 78%, at least 79%, at least 80%, at least 81%, at least 82%, at least 83%, at least 84%, at least 85%, at least 86%, at least 87%, at least 88%, at least 89%, at least 90%, at least 91%, at least 92%, at least 93%, at least 94%, at least 95%, at least 96%, at least 97%, at least 98%, or at least 99% identical to one of SEQ ID NOs: 67-83 and 427-1039. In one embodiment, composition comprises a protein comprising (1) an amino acid of one of SEQ ID NOs: 1-46; and (2) optionally an amino acid of one of SEQ ID NOs: 67-83 and 427-1039.

[0328] In one embodiment, composition comprises a protein comprising an amino acid sequence at least 70%, at least 71%, at least 72%, at least 73%, at least 74%, at least 75%, at least 76%, at least 77%, at least 78%, at least 79%, at least 80%, at least 81%, at least 82%, at least 83%, at least 84%, at least 85%, at least 86%, at least 87%, at least 88%, at least 89%, at least 90%, at least 91%, at least 92%, at least 93%, at least 94%, at least 95%, at least 96%, at least 97%, at least 98%, or at least 99% identical to one of SEQ ID NOs: 150-171. In one embodiment, the nucleic acid sequence encoding a protein comprises a protein comprising an amino acid sequence of one of SEQ ID NOs: 150-171.

[0329] In one aspect, the present invention provides compositions for decreasing the number of an RNA transcript in a subject. In one embodiment, the composition comprises a fusion protein, wherein the fusion protein comprises a CRISPR-associated (Cas) protein, a fluorescent protein, and optionally a localization sequence, such as an NLS, NES or organelle localization signal. In one embodiment, the crRNA substantially hybridizes to a target RNA sequence in the RNA transcript. In one embodiment, the composition comprises a crRNA array. In one embodiment, the crRNA array comprises two or more sequences which substantially hybridizes to a target RNA sequence in the RNA transcript.

[0330] In one embodiment, the composition comprises a fusion protein comprising (1) an amino acid sequence at least 70%, at least 71%, at least 72%, at least 73%, at least 74%, at least 75%, at least 76%, at least 77%, at least 78%, at least 79%, at least 80%, at least 81%, at least 82%, at least 83%, at least 84%, at least 85%, at least 86%, at least 87%, at least 88%, at least 89%, at least 90%, at least 91%, at least 92%, at least 93%, at least 94%, at least 95%, at least 96%, at least 97%, at least 98%, or at least 99% identical to one of SEQ ID NOs: 47-48; (2) an amino acid sequence at least 70%, at least 71%, at least 72%, at least 73%, at least 74%, at least 75%, at least 76%, at least 77%, at least 78%, at least 79%, at least 80%, at least 81%, at least 82%, at least 83%, at least 84%, at least 85%, at least 86%, at least 87%, at least 88%, at least 89%, at least 90%, at least 91%, at least 92%, at least 93%, at least 94%, at least 95%, at least 96%, at least 97%, at least 98%, or at least 99% identical to one of SEQ ID NOs: 49-56; and (3) optionally an amino acid sequence at least 70%, at least 71%, at least 72%, at least 73%, at least 74%, at least 75%, at least 76%, at least 77%, at least 78%, at least 79%, at least 80%, at least 81%, at least 82%, at least 83%, at least 84%, at least 85%, at least 86%, at least 87%, at least 88%, at least 89%, at least 90%, at least 91%, at least 92%, at least 93%, at least 94%, at least 95%, at least 96%, at least 97%, at least 98%, or at least 99% identical to one of SEQ ID NOs: 67-83 and 427-1039. In one embodiment, composition comprises a fusion protein comprising (1) an amino acid of one of SEQ ID NOs: 47-48; (2) amino acid of one of SEQ ID NOs: 49-56; and (3) an amino acid of one of SEQ ID NOs: 67-83 and 427-1039.

[0331] In one embodiment, composition comprises a fusion protein comprising an amino acid sequence at least 70%, at least 71%, at least 72%, at least 73%, at least 74%, at least 75%, at least 76%, at least 77%, at least 78%, at least 79%, at least 80%, at least 81%, at least 82%, at least 83%, at least 84%, at least 85%, at least 86%, at least 87%, at least 88%, at least 89%, at least 90%, at least 91%, at least 92%, at least 93%, at least 94%, at least 95%, at least 96%, at least 97%, at least 98%, or at least 99% identical to one of SEQ ID NOs: 84-149. In one embodiment, the nucleic acid sequence encoding a fusion protein comprises a protein comprising an amino acid sequence of one of SEQ ID NOs: 84-149.

[0332] The disclosure also encompasses the use of pharmaceutical compositions of the disclosure to practice the methods of the disclosure. Such a pharmaceutical composition may consist of at least one modulator (e.g., inhibitor or activator) composition of the invention or a salt thereof in a form suitable for administration to a subject, or the pharmaceutical composition may comprise at least one modulator (e.g., inhibitor or activator) composition of the invention or a salt thereof, and one or more pharmaceutically acceptable carriers, one or more additional ingredients, or some combination of these. The compound of the invention may be present in the pharmaceutical composition in the form of a physiologically acceptable salt, such as in combination with a physiologically acceptable cation or anion, as is well known in the art.

[0333] In an embodiment, the pharmaceutical compositions useful for practicing the methods of the invention may be administered to deliver a dose of between 1 ng/kg/day and 100 mg/kg/day. In another embodiment, the pharmaceutical compositions useful for practicing the invention may be administered to deliver a dose of between 1 ng/kg/day and 500 mg/kg/day.

[0334] The relative amounts of the active ingredient, the pharmaceutically acceptable carrier, and any additional ingredients in a pharmaceutical composition of the invention will vary, depending upon the identity, size, and condition of the subject treated and further depending upon the route by which the composition is to be administered. By way of example, the composition may comprise between 0.1% and 100% (w/w) active ingredient.

[0335] Pharmaceutical compositions that are useful in the methods of the invention may be suitably developed for oral, rectal, vaginal, parenteral, topical, pulmonary, intranasal, buccal, ophthalmic, or another route of administration. A composition useful within the methods of the invention may be directly administered to the skin, or any other tissue of a mammal. Other contemplated formulations include liposomal preparations, resealed erythrocytes containing the active ingredient, and immunologically-based formulations. The route(s) of administration will be readily apparent to the skilled artisan and will depend upon any number of factors including the type and severity of the disease being treated, the type and age of the veterinary or human subject being treated, and the like.

[0336] The formulations of the pharmaceutical compositions described herein may be prepared by any method known or hereafter developed in the art of pharmacology. In general, such preparatory methods include the step of bringing the active ingredient into association with a carrier or one or more other accessory ingredients, and then, if necessary or desirable, shaping or packaging the product into a desired single- or multi-dose unit.

[0337] As used herein, a “unit dose” is a discrete amount of the pharmaceutical composition comprising a predetermined amount of the active ingredient. The amount of the active ingredient is generally equal to the dosage of the active ingredient that would be administered to a subject or a convenient fraction of such a dosage such as, for example, one-half or one-third of such a dosage. The unit dosage form may be for a single daily dose or one of multiple daily doses (e.g., about 1 to 4 or more times per day). When multiple daily doses are used, the unit dosage form may be the same or different for each dose.

[0338] In one embodiment, the compositions of the invention are formulated using one or more pharmaceutically acceptable excipients or carriers. In one embodiment, the pharmaceutical compositions of the invention comprise a therapeutically effective amount of a compound or conjugate of the invention and a pharmaceutically acceptable carrier. Pharmaceutically acceptable carriers that are useful, include, but are not limited to, glycerol, water, saline, ethanol and other pharmaceutically acceptable salt solutions such as phosphates and salts of organic acids. Examples of these and other pharmaceutically acceptable carriers are described in Remington's Pharmaceutical Sciences (1991, Mack Publication Co., New Jersey).

[0339] The carrier may be a solvent or dispersion medium containing, for example, water, ethanol, polyol (for example, glycerol, propylene glycol, and liquid polyethylene glycol, and the like), suitable mixtures thereof, and vegetable oils. The proper fluidity may be maintained, for example, by the use of a coating such as lecithin, by the maintenance of the required particle size in the case of dispersion and by the use of surfactants. Prevention of the action of microorganisms may be achieved by various antibacterial and antifungal agents, for example, parabens, chlorobutanol, phenol, ascorbic acid, thimerosal, and the like. In many cases, isotonic agents, for example, sugars, sodium chloride, or polyalcohols such as mannitol and sorbitol are included in the composition. Prolonged absorption of the injectable compositions may be brought about by including in the composition an agent that delays absorption, for example, aluminum monostearate or gelatin. In one embodiment, the pharmaceutically acceptable carrier is not DMSO alone.

[0340] Formulations may be employed in admixtures with conventional excipients, i.e., pharmaceutically acceptable organic or inorganic carrier substances suitable for oral, vaginal, parenteral, nasal, intravenous, subcutaneous, enteral, or any other suitable mode of administration, known to the art. The pharmaceutical preparations may be sterilized and if desired mixed with auxiliary agents, e.g., lubricants, preservatives, stabilizers, wetting agents, emulsifiers, salts for influencing osmotic pressure buffers, coloring, flavoring and/or aromatic substances and the like. They may also be combined where desired with other active agents, e.g., other analgesic agents.

[0341] As used herein, “additional ingredients” include, but are not limited to, one or more of the following: excipients; surface active agents; dispersing agents; inert diluents; granulating and disintegrating agents; binding agents; lubricating agents; sweetening agents; flavoring agents; coloring agents; preservatives; physiologically degradable compositions such as gelatin; aqueous vehicles and solvents; oily vehicles and solvents; suspending agents; dispersing or wetting agents; emulsifying agents, demulcents; buffers; salts; thickening agents; fillers; emulsifying agents; antioxidants; antibiotics; antifungal agents; stabilizing agents; and pharmaceutically acceptable polymeric or hydrophobic materials. Other “additional ingredients” that may be included in the pharmaceutical compositions of the invention are known in the art and described, for example in Genaro, ed. (1985, Remington's Pharmaceutical Sciences, Mack Publishing Co., Easton, Pa.), which is incorporated herein by reference.

[0342] The composition of the invention may comprise a preservative from about 0.005% to 2.0% by total weight of the composition. The preservative is used to prevent spoilage in the case of exposure to contaminants in the environment. Examples of preservatives useful in accordance with the invention included but are not limited to those selected from the group consisting of benzyl alcohol, sorbic acid, parabens, imidurea and combinations thereof. An exemplary preservative is a combination of about 0.5% to 2.0% benzyl alcohol and 0.05% to 0.5% sorbic acid.

[0343] In one embodiment, the composition includes an anti-oxidant and a chelating agent that inhibits the degradation of the compound. Exemplary antioxidants for some compounds are BHT, BHA, alpha-tocopherol and ascorbic acid in the range of about 0.01% to 0.3% and BHT in the range of 0.03% to 0.1% by weight by total weight of the composition. In one embodiment, the chelating agent is present in an amount of from 0.01% to 0.5% by weight by total weight of the composition. Exemplary chelating agents include edetate salts (e.g. disodium edetate) and citric acid in the weight range of about 0.01% to 0.20%. In some embodiments, the chelating agent is in the range of 0.02% to 0.10% by weight by total weight of the composition. The chelating agent is useful for chelating metal ions in the composition that may be detrimental to the shelf life of the formulation. While BHT and disodium edetate are exemplary antioxidants and chelating agent respectively for some compounds, other suitable and equivalent antioxidants and chelating agents may be substituted therefore as would be known to those skilled in the art.

[0344] Liquid suspensions may be prepared using conventional methods to achieve suspension of the active ingredient in an aqueous or oily vehicle. Aqueous vehicles include, for example, water, and isotonic saline. Oily vehicles include, for example, almond oil, oily esters, ethyl alcohol, vegetable oils such as arachis, olive, sesame, or coconut oil, fractionated vegetable oils, and mineral oils such as liquid paraffin. Liquid suspensions may further comprise one or more additional ingredients including, but not limited to, suspending agents, dispersing or wetting agents, emulsifying agents, demulcents, preservatives, buffers, salts, flavorings, coloring agents, and sweetening agents. Oily suspensions may further comprise a thickening agent. Known suspending agents include, but are not limited to, sorbitol syrup, hydrogenated edible fats, sodium alginate, polyvinylpyrrolidone, gum tragacanth, gum acacia, and cellulose derivatives such as sodium carboxymethylcellulose, methylcellulose, hydroxypropylmethylcellulose. Known dispersing or wetting agents include, but are not limited to, naturally-occurring phosphatides such as lecithin, condensation products of an alkylene oxide with a fatty acid, with a long chain aliphatic alcohol, with a partial ester derived from a fatty acid and a hexitol, or with a partial ester derived from a fatty acid and a hexitol anhydride (e.g., polyoxyethylene stearate, heptadecaethyleneoxycetanol, polyoxyethylene sorbitol monooleate, and polyoxyethylene sorbitan monooleate, respectively). Known emulsifying agents include, but are not limited to, lecithin, and acacia. Known preservatives include, but are not limited to, methyl, ethyl, or n-propyl-para-hydroxybenzoates, ascorbic acid, and sorbic acid. Known sweetening agents include, for example, glycerol, propylene glycol, sorbitol, sucrose, and saccharin. Known thickening agents for oily suspensions include, for example, beeswax, hard paraffin, and cetyl alcohol.

[0345] Liquid solutions of the active ingredient in aqueous or oily solvents may be prepared in substantially the same manner as liquid suspensions, the primary difference being that the active ingredient is dissolved, rather than suspended in the solvent. As used herein, an “oily” liquid is one which comprises a carbon-containing liquid molecule and which exhibits a less polar character than water. Liquid solutions of the pharmaceutical composition of the invention may comprise each of the components described with regard to liquid suspensions, it being understood that suspending agents will not necessarily aid dissolution of the active ingredient in the solvent. Aqueous solvents include, for example, water, and isotonic saline. Oily solvents include, for example, almond oil, oily esters, ethyl alcohol, vegetable oils such as arachis, olive, sesame, or coconut oil, fractionated vegetable oils, and mineral oils such as liquid paraffin.

[0346] Powdered and granular formulations of a pharmaceutical preparation of the invention may be prepared using known methods. Such formulations may be administered directly to a subject, used, for example, to form tablets, to fill capsules, or to prepare an aqueous or oily suspension or solution by addition of an aqueous or oily vehicle thereto. Each of these formulations may further comprise one or more of dispersing or wetting agent, a suspending agent, and a preservative. Additional excipients, such as fillers and sweetening, flavoring, or coloring agents, may also be included in these formulations.

[0347] A pharmaceutical composition of the invention may also be prepared, packaged, or sold in the form of oil-in-water emulsion or a water-in-oil emulsion. The oily phase may be a vegetable oil such as olive or arachis oil, a mineral oil such as liquid paraffin, or a combination of these. Such compositions may further comprise one or more emulsifying agents such as naturally occurring gums such as gum acacia or gum tragacanth, naturally-occurring phosphatides such as soybean or lecithin phosphatide, esters or partial esters derived from combinations of fatty acids and hexitol anhydrides such as sorbitan monooleate, and condensation products of such partial esters with ethylene oxide such as polyoxyethylene sorbitan monooleate. These emulsions may also contain additional ingredients including, for example, sweetening or flavoring agents.

[0348] Methods for impregnating or coating a material with a chemical composition are known in the art, and include, but are not limited to methods of depositing or binding a chemical composition onto a surface, methods of incorporating a chemical composition into the structure of a material during the synthesis of the material (i.e., such as with a physiologically degradable material), and methods of absorbing an aqueous or oily solution or suspension into an absorbent material, with or without subsequent drying.

[0349] The regimen of administration may affect what constitutes an effective amount. The therapeutic formulations may be administered to the subject either prior to or after a diagnosis of disease. Further, several divided dosages, as well as staggered dosages may be administered daily or sequentially, or the dose may be continuously infused, or may be a bolus injection. Further, the dosages of the therapeutic formulations may be proportionally increased or decreased as indicated by the exigencies of the therapeutic or prophylactic situation.

[0350] Administration of the compositions of the present invention to a subject, include a mammal, for example a human, may be carried out using known procedures, at dosages and for periods of time effective to prevent or treat disease. An effective amount of the therapeutic compound necessary to achieve a therapeutic effect may vary according to factors such as the activity of the particular compound employed; the time of administration; the rate of excretion of the compound; the duration of the treatment; other drugs, compounds or materials used in combination with the compound; the state of the disease or disorder, age, sex, weight, condition, general health and prior medical history of the subject being treated, and like factors well-known in the medical arts. Dosage regimens may be adjusted to provide the optimum therapeutic response. For example, several divided doses may be administered daily, or the dose may be proportionally reduced as indicated by the exigencies of the therapeutic situation. A non-limiting example of an effective dose range for a therapeutic compound of the invention is from about 1 and 5,000 mg/kg of body weight/per day. One of ordinary skill in the art would be able to study the relevant factors and make the determination regarding the effective amount of the therapeutic compound without undue experimentation.

[0351] The compound may be administered to a subject as frequently as several times daily, or it may be administered less frequently, such as once a day, once a week, once every two weeks, once a month, or even less frequently, such as once every several months or even once a year or less. It is understood that the amount of compound dosed per day may be administered, in non-limiting examples, every day, every other day, every 2 days, every 3 days, every 4 days, or every 5 days. For example, with every other day administration, a 5 mg per day dose may be initiated on Monday with a first subsequent 5 mg per day dose administered on Wednesday, a second subsequent 5 mg per day dose administered on Friday, and so on. The frequency of the dose will be readily apparent to the skilled artisan and will depend upon any number of factors, such as, but not limited to, the type and severity of the disease being treated, the type and age of the animal, etc.

[0352] Actual dosage levels of the active ingredients in the pharmaceutical compositions of this invention may be varied so as to obtain an amount of the active ingredient that is effective to achieve the desired therapeutic response for a particular subject, composition, and mode of administration, without being toxic to the subject.

[0353] A medical doctor, e.g., physician or veterinarian, having ordinary skill in the art may readily determine and prescribe the effective amount of the pharmaceutical composition required. For example, the physician or veterinarian could start doses of the compounds of the invention employed in the pharmaceutical composition at levels lower than that required in order to achieve the desired therapeutic effect and gradually increase the dosage until the desired effect is achieved.

[0354] In particular embodiments, it is especially advantageous to formulate the compound in dosage unit form for ease of administration and uniformity of dosage. Dosage unit form as used herein refers to physically discrete units suited as unitary dosages for the subjects to be treated; each unit containing a predetermined quantity of therapeutic compound calculated to produce the desired therapeutic effect in association with the required pharmaceutical vehicle. The dosage unit forms of the invention are dictated by and directly dependent on (a) the unique characteristics of the therapeutic compound and the particular therapeutic effect to be achieved, and (b) the limitations inherent in the art of compounding/formulating such a therapeutic compound for the treatment of a disease in a subject.

[0355] In one embodiment, the compositions of the invention are administered to the subject in dosages that range from one to five times per day or more. In another embodiment, the compositions of the invention are administered to the subject in range of dosages that include, but are not limited to, once every day, every two, days, every three days to once a week, and once every two weeks. It will be readily apparent to one skilled in the art that the frequency of administration of the various combination compositions of the invention will vary from subject to subject depending on many factors including, but not limited to, age, disease or disorder to be treated, gender, overall health, and other factors. Thus, the invention should not be construed to be limited to any particular dosage regime and the precise dosage and composition to be administered to any subject will be determined by the attending physical taking all other factors about the subject into account.

[0356] Compounds of the invention for administration may be in the range of from about 1 mg to about 10,000 mg, about 20 mg to about 9,500 mg, about 40 mg to about 9,000 mg, about 75 mg to about 8,500 mg, about 150 mg to about 7,500 mg, about 200 mg to about 7,000 mg, about 3050 mg to about 6,000 mg, about 500 mg to about 5,000 mg, about 750 mg to about 4,000 mg, about 1 mg to about 3,000 mg, about 10 mg to about 2,500 mg, about 20 mg to about 2,000 mg, about 25 mg to about 1,500 mg, about 50 mg to about 1,000 mg, about 75 mg to about 900 mg, about 100 mg to about 800 mg, about 250 mg to about 750 mg, about 300 mg to about 600 mg, about 400 mg to about 500 mg, and any and all whole or partial increments there between.

[0357] In some embodiments, the dose of a compound of the invention is from about 1 mg and about 2,500 mg. In some embodiments, a dose of a compound of the invention used in compositions described herein is less than about 10,000 mg, or less than about 8,000 mg, or less than about 6,000 mg, or less than about 5,000 mg, or less than about 3,000 mg, or less than about 2,000 mg, or less than about 1,000 mg, or less than about 500 mg, or less than about 200 mg, or less than about 50 mg. Similarly, in some embodiments, a dose of a second compound (i.e., a drug used for treating the same or another disease as that treated by the compositions of the invention) as described herein is less than about 1,000 mg, or less than about 800 mg, or less than about 600 mg, or less than about 500 mg, or less than about 400 mg, or less than about 300 mg, or less than about 200 mg, or less than about 100 mg, or less than about 50 mg, or less than about 40 mg, or less than about 30 mg, or less than about 25 mg, or less than about 20 mg, or less than about 15 mg, or less than about 10 mg, or less than about 5 mg, or less than about 2 mg, or less than about 1 mg, or less than about 0.5 mg, and any and all whole or partial increments thereof.

[0358] In one embodiment, the present invention is directed to a packaged pharmaceutical composition comprising a container holding a therapeutically effective amount of a compound or conjugate of the invention, alone or in combination with a second pharmaceutical agent; and instructions for using the compound or conjugate to treat, prevent, or reduce one or more symptoms of a disease in a subject.

[0359] The term “container” includes any receptacle for holding the pharmaceutical composition. For example, in one embodiment, the container is the packaging that contains the pharmaceutical composition. In other embodiments, the container is not the packaging that contains the pharmaceutical composition, i.e., the container is a receptacle, such as a box or vial that contains the packaged pharmaceutical composition or unpackaged pharmaceutical composition and the instructions for use of the pharmaceutical composition. Moreover, packaging techniques are well known in the art. It should be understood that the instructions for use of the pharmaceutical composition may be contained on the packaging containing the pharmaceutical composition, and as such the instructions form an increased functional relationship to the packaged product. However, it should be understood that the instructions may contain information pertaining to the compound's ability to perform its intended function, e.g., treating or preventing a disease in a subject, or delivering an imaging or diagnostic agent to a subject.

[0360] Routes of administration of any of the compositions of the invention include oral, nasal, parenteral, sublingual, transdermal, transmucosal (e.g., sublingual, lingual, (trans)buccal, and (intra)nasal,), intravesical, intraduodenal, intragastrical, rectal, intra-peritoneal, subcutaneous, intramuscular, intradermal, intra-arterial, intravenous, or administration.

[0361] Suitable compositions and dosage forms include, for example, tablets, capsules, caplets, pills, gel caps, troches, dispersions, suspensions, solutions, syrups, granules, beads, transdermal patches, gels, powders, pellets, magmas, lozenges, creams, pastes, plasters, lotions, discs, suppositories, liquid sprays for nasal or oral administration, dry powder or aerosolized formulations for inhalation, compositions and formulations for intravesical administration and the like. It should be understood that the formulations and compositions that would be useful in the present invention are not limited to the particular formulations and compositions that are described herein.

### Methods of Diagnosing & Visualizing RNA

[0362] In one aspect, the disclosure provides methods of visualizing an RNA in a subject. For example, in one embodiment, the methods provide visualization of a nuclear RNA in a subject. In one embodiment, nuclear RNA is abnormal nuclear RNA. In one embodiment, the methods provide visualization of cytoplasmic RNA in a subject. In one embodiment, the methods provide visualization of an organelle-localized RNA in a subject. For example, in one embodiment, the methods provide visualization of RNA localized in the nucleolus, ribosome, vesicle, rough endoplasmic reticulum, Golgi apparatus, cytoskeleton, smooth endoplasmic reticulum, mitochondria, vacuole, cytosol, lysosome, or centriole. In one embodiment, the methods provide visualization of cell-membrane associated RNA. In one embodiment, methods provide visualization of decrease extracellular RNA.

[0363] In one embodiment, the method comprises (A) administering to the subject (1) a nucleic acid molecule encoding a protein of the disclosure comprising a Cas protein, a fluorescent protein, and optionally a localization sequence, such as an NLS, NES or organelle localization signal, or a fusion protein of the disclosure comprising a Cas protein, a fluorescent protein, and optionally a localization sequence, such as an NLS, NES, or organelle localization signal; and (2) a nucleic acid molecule encoding a crRNA or crRNA array comprising a targeting nucleotide sequence complimentary to a target RNA sequence in the RNA or a crRNA or crRNA array comprising a targeting nucleotide sequence complimentary to a target RNA sequence in the RNA; and (B) visualizing the nuclear RNA.

[0364] In one embodiment, the method comprises (A) administering (1) a nucleic acid molecule encoding a protein of the disclosure comprising a Cas protein, a fluorescent protein, and optionally a localization sequence; and (2) a nucleic acid molecule encoding a crRNA or crRNA array comprising a targeting nucleotide sequence complimentary to a target RNA sequence in the RNA or a crRNA or crRNA array comprising a targeting nucleotide sequence complimentary to a target RNA sequence in the RNA; and (B) visualizing the nuclear RNA.

[0365] In one embodiment, the method comprises (A) administering (1) a protein of the disclosure comprising a Cas protein, a fluorescent protein, and optionally a localization sequence; and (2) a nucleic acid molecule encoding a crRNA or crRNA array comprising a targeting nucleotide sequence complimentary to a target RNA sequence in the RNA or a crRNA or crRNA array comprising a targeting nucleotide sequence complimentary to a target RNA sequence in the RNA; and (B) visualizing the nuclear RNA.

[0366] In one embodiment, the subject is a cell. In one embodiment, the cell is a prokaryotic cell or eukaryotic cell. In one embodiment, the cell is a eukaryotic cell. In one embodiment, the cell is a plant, animal, or fungi cell. In one embodiment, the cell is a plant cell. In one embodiment, the cell is an animal cell. In one embodiment, the cell is a yeast cell.

[0367] In one embodiment, the subject is a mammal. For example, in one embodiment, the subject is a human, non-human primate, dog, cat, horse, cow, goat, sheep, rabbit, pig, rat, or mouse. In one embodiment, the subject is a non-mammalian subject. For example, in one embodiment, the subject is a zebrafish, fruit fly, or roundworm.

[0368] In one embodiment, the RNA is visualized in vitro. In one embodiment, the RNA is visualized in vivo. In one embodiment, the RNA is nuclear RNA foci. In one embodiment, the crRNA comprises a sequence complementary to a CTG repeat expansion in the 3′UTR of the human dystrophia myotonica-protein kinase (DMPK) gene. In one embodiment, the crRNA comprises a sequence of one of SEQ ID NOs:348-354.

[0369] In one embodiment, the invention provides a method of diagnosing a disease or disorder associated with abnormal RNA. In one embodiment, the abnormal RNA is nuclear RNA. In one embodiment, the abnormal RNA is nuclear RNA foci. In one embodiment, the abnormal RNA is cytoplasmic RNA. In one embodiment, the abnormal RNA is organelle-localized RNA. For example, in one embodiment, the abnormal RNA is localized in the nucleolus, ribosome, vesicle, rough endoplasmic reticulum, Golgi apparatus, cytoskeleton, smooth endoplasmic reticulum, mitochondria, vacuole, cytosol, lysosome, or centriole. In one embodiment, the abnormal RNA is cell-membrane associated RNA. In one embodiment, abnormal RNA is extracellular RNA.

[0370] In one embodiment, the method comprises (A) administering to the subject (1) a nucleic acid molecule encoding a protein of the disclosure comprising a Cas protein, a fluorescent protein, and optionally a localization sequence, such as an NLS, NES or organelle localization signal, or a fusion protein of the disclosure comprising a Cas protein, a fluorescent protein, and optionally a localization sequence, such as an NLS, NES, or organelle localization signal; and (2) a nucleic acid molecule encoding a crRNA or crRNA array comprising a targeting nucleotide sequence complimentary to a target RNA sequence in the abnormal RNA or a crRNA or crRNA array comprising a targeting nucleotide sequence complimentary to a target RNA sequence in the abnormal RNA; (B) visualizing the nuclear RNA; and (C) diagnosing the disease or disorder when the abnormal RNA is present.

[0371] In one embodiment, the method comprises (A) administering to the subject (1) a nucleic acid molecule encoding a protein of the disclosure comprising a Cas protein, a fluorescent protein, and optionally a localization sequence, such as an NLS, NES or organelle localization signal; and (2) a nucleic acid molecule encoding a crRNA or crRNA array comprising a targeting nucleotide sequence complimentary to a target RNA sequence in the abnormal RNA or a crRNA or crRNA array comprising a targeting nucleotide sequence complimentary to a target RNA sequence in the abnormal RNA; (B) visualizing the nuclear RNA; and (C) diagnosing the disease or disorder when the abnormal RNA is present.

[0372] In one embodiment, the method comprises (A) administering to the subject (1) a protein of the disclosure comprising a Cas protein, a fluorescent protein, and optionally a localization sequence, such as an NLS, NES or organelle localization signal; and (2) a nucleic acid molecule encoding a crRNA or crRNA array comprising a targeting nucleotide sequence complimentary to a target RNA sequence in the abnormal RNA or a crRNA or crRNA array comprising a targeting nucleotide sequence complimentary to a target RNA sequence in the abnormal RNA; (B) visualizing the nuclear RNA; and (C) diagnosing the disease or disorder when the abnormal RNA is present.

[0373] In one embodiment, the subject is a cell. In one embodiment, the cell is a prokaryotic cell or eukaryotic cell. In one embodiment, the cell is a eukaryotic cell. In one embodiment, the cell is a plant, animal, or fungi cell. In one embodiment, the cell is a plant cell. In one embodiment, the cell is an animal cell. In one embodiment, the cell is a yeast cell.

[0374] In one embodiment, the subject is a mammal. For example, in one embodiment, the subject is a human, non-human primate, dog, cat, horse, cow, goat, sheep, rabbit, pig, rat, or mouse. In one embodiment, the subject is a non-mammalian subject. For example, in one embodiment, the subject is a zebrafish, fruit fly, or roundworm.

### Methods of Decreasing RNA & Methods of Treatment

[0375] In one aspect, the disclosure provides methods of decreasing the number of an RNA in a subject. For example, in one embodiment, the methods decrease the number of a nuclear RNA in a subject. In one embodiment, nuclear RNA is abnormal nuclear RNA. In one embodiment, the methods decrease the number of a cytoplasmic RNA in a subject. In one embodiment, the methods decrease the number of an organelle-localized RNA in a subject. For example, in one embodiment, the methods decrease RNA localized in the nucleolus, ribosome, vesicle, rough endoplasmic reticulum, Golgi apparatus, cytoskeleton, smooth endoplasmic reticulum, mitochondria, vacuole, cytosol, lysosome, or centriole. In one embodiment, the methods decrease cell-membrane associated RNA. In one embodiment, the methods decrease extracellular RNA.

[0376] In one embodiment, the method comprises administering to the subject (1) a nucleic acid molecule encoding a fusion protein of the disclosure comprising a Cas protein and optionally a localization sequence, such as an NLS, NES or organelle localization signal, or a fusion protein of the disclosure comprising a Cas protein and optionally a localization sequence, such as an NLS, NES, or organelle localization signal; and (2) a nucleic acid molecule encoding a crRNA or crRNA array comprising a targeting nucleotide sequence complimentary to a target RNA sequence in the RNA or a crRNA or crRNA array comprising a targeting nucleotide sequence complimentary to a target RNA sequence in the RNA.

[0377] In one embodiment, the method comprises administering to the subject (1) a nucleic acid molecule encoding a fusion protein of the disclosure comprising a Cas protein and optionally a localization sequence, such as an NLS, NES or organelle localization signal; and (2) a nucleic acid molecule encoding a crRNA or crRNA array comprising a targeting nucleotide sequence complimentary to a target RNA sequence in the RNA or a crRNA or crRNA array comprising a targeting nucleotide sequence complimentary to a target RNA sequence in the RNA.

[0378] In one embodiment, the method comprises administering to the subject (1) a fusion protein of the disclosure comprising a Cas protein and optionally a localization sequence, such as an NLS, NES or organelle localization signal; and (2) a nucleic acid molecule encoding a crRNA or crRNA array comprising a targeting nucleotide sequence complimentary to a target RNA sequence in the RNA or a crRNA or crRNA array comprising a targeting nucleotide sequence complimentary to a target RNA sequence in the RNA.

[0379] In some embodiments, the RNA cytoplasmic. In such embodiments, the method comprises administering to the subject (1) a protein of the disclosure comprising a Cas protein or a nucleic acid molecule encoding a protein of the disclosure comprising a Cas protein; and (2) a nucleic acid molecule encoding a crRNA comprising a targeting nucleotide sequence complimentary to a target RNA sequence, or a crRNA comprising a targeting nucleotide sequence complimentary to a target RNA sequence.

[0380] In some embodiments, the RNA cytoplasmic. In such embodiments, the method comprises administering to the subject (1) a protein of the disclosure comprising a Cas protein and a NES or a nucleic acid molecule encoding a protein of the disclosure comprising a Cas protein and a NES; and (2) a nucleic acid molecule encoding a crRNA comprising a targeting nucleotide sequence complimentary to a target RNA sequence, or a crRNA comprising a targeting nucleotide sequence complimentary to a target RNA sequence

[0381] In some embodiments, the RNA nuclear. In such embodiments, the method comprises administering to the subject (1) a protein of the disclosure comprising a Cas protein and a NLS or a nucleic acid molecule encoding a protein of the disclosure comprising a Cas protein and a NLS; and (2) a nucleic acid molecule encoding a crRNA comprising a targeting nucleotide sequence complimentary to a target RNA sequence, or a crRNA comprising a targeting nucleotide sequence complimentary to a target RNA sequence

[0382] In one embodiment, the subject is a cell. In one embodiment, the cell is a prokaryotic cell or eukaryotic cell. In one embodiment, the cell is a eukaryotic cell. In one embodiment, the cell is a plant, animal, or fungi cell. In one embodiment, the cell is a plant cell. In one embodiment, the cell is an animal cell. In one embodiment, the cell is a yeast cell.

[0383] In one embodiment, the subject is a mammal. For example, in one embodiment, the subject is a human, non-human primate, dog, cat, horse, cow, goat, sheep, rabbit, pig, rat, or mouse. In one embodiment, the subject is a non-mammalian subject. For example, in one embodiment, the subject is a zebrafish, fruit fly, or roundworm.

[0384] In one embodiment, the amount of nuclear RNA is reduced in vitro. In one embodiment, the amount of nuclear RNA is reduced in vivo.

[0385] In one embodiment, the nuclear RNA is nuclear RNA foci. In one embodiment, the nuclear RNA foci include a CUG repeat. In one embodiment, the crRNA comprises a sequence complementary to a CUG repeat expansion. In one embodiment, the crRNA comprises a sequence complementary to a CTG repeat expansion. In one embodiment, the crRNA comprises a sequence complementary to a CTG repeat expansion in the 3′UTR of the human dystrophia myotonica-protein kinase (DMPK) gene. In one embodiment, the crRNA comprises a sequence of one of SEQ ID NOs:348-354.

[0386] In one aspect, the present invention provides methods of treating a subject with a disease or disorder associated with abnormal RNA. In one embodiment, the method comprises administering to the subject (1) a nucleic acid molecule encoding a protein of the disclosure comprising a Cas protein and optionally a localization sequence, such as an NLS, NES or organelle localization signal, or a protein of the disclosure comprising a Cas protein and optionally a localization sequence, such as an NLS, NES, or organelle localization signal; and (2) a nucleic acid molecule encoding crRNA comprising a targeting nucleotide sequence complimentary to a target RNA sequence in the nuclear RNA or a crRNA molecule comprising a targeting nucleotide sequence complimentary to a target RNA sequence in the nuclear RNA.

[0387] In one embodiment, the method comprises administering to the subject (1) a nucleic acid molecule encoding a protein of the disclosure comprising a Cas protein and optionally a localization sequence, such as an NLS, NES or organelle localization signal; and (2) a nucleic acid molecule encoding crRNA comprising a targeting nucleotide sequence complimentary to a target RNA sequence in the nuclear RNA or a crRNA molecule comprising a targeting nucleotide sequence complimentary to a target RNA sequence in the nuclear RNA.

[0388] In one embodiment, the method comprises administering to the subject (1) a protein of the disclosure comprising a Cas protein and optionally a localization sequence, such as an NLS, NES or organelle localization signal; and (2) a nucleic acid molecule encoding crRNA comprising a targeting nucleotide sequence complimentary to a target RNA sequence in the nuclear RNA or a crRNA molecule comprising a targeting nucleotide sequence complimentary to a target RNA sequence in the nuclear RNA.

[0389] In one embodiment, the disease or disorder associated with abnormal nuclear RNA is selected from the group consisting of Myotonic Dystrophy type 2 (DM2), Amyotrophic lateral sclerosis (ALS), Huntington's disease-like 2 (HDL2), Spinocerebellar ataxias 8, 31 and 10 (SCAB, −31, −10) and fragile X-associated tremor ataxia syndrome (FXTAS).

[0390] In one embodiment, the abnormal nuclear RNA is toxic nuclear RNA foci. In one embodiment, the disease or disorder associated with toxic nuclear RNA foci Myotonic Dystrophy type 1. In one embodiment, the crRNA comprises a sequence complementary to a CTG repeat expansion in the 3′UTR of the human dystrophia myotonica-protein kinase (DMPK) gene. In one embodiment, the crRNA comprises a sequence selected from the group consisting of SEQ ID NOs: 348-354.

[0391] In one aspect, the present invention provides methods cleaving of a target RNA in a subject. In one embodiment, the method comprises administering to the subject (1) a nucleic acid molecule encoding a protein of the disclosure comprising a Cas protein and optionally a localization sequence, such as an NLS, NES, or organelle localization signal, or a protein of the disclosure comprising a Cas protein and optionally a localization sequence, such as an NLS, NES, or organelle localization signal; and (2) a nucleic acid molecule encoding crRNA comprising a targeting nucleotide sequence complimentary to a RNA sequence in the target RNA or a crRNA molecule comprising a targeting nucleotide sequence complimentary to a target RNA sequence in the target RNA.

[0392] In one embodiment, the method comprises administering to the subject (1) a nucleic acid molecule encoding a protein of the disclosure comprising a Cas protein and optionally a localization sequence, such as an NLS, NES, or organelle localization signal; and (2) a nucleic acid molecule encoding crRNA comprising a targeting nucleotide sequence complimentary to a RNA sequence in the target RNA or a crRNA molecule comprising a targeting nucleotide sequence complimentary to a target RNA sequence in the target RNA.

[0393] In one embodiment, the method comprises administering to the subject (1) a protein of the disclosure comprising a Cas protein and optionally a localization sequence, such as an NLS, NES, or organelle localization signal; and (2) a nucleic acid molecule encoding crRNA comprising a targeting nucleotide sequence complimentary to a RNA sequence in the target RNA or a crRNA molecule comprising a targeting nucleotide sequence complimentary to a target RNA sequence in the target RNA.

[0394] In one aspect, the present invention provides methods of treating a disease or disorder associated with increased gene expression. In one embodiment, the method comprises administering to the subject (1) a nucleic acid molecule encoding a protein of the disclosure comprising a Cas protein and optionally a localization sequence, such as an NLS, NES, or organelle localization signal, or a protein of the disclosure comprising a Cas protein and optionally a localization sequence, such as an NLS, NES, or organelle localization signal; and (2) a nucleic acid molecule encoding crRNA comprising a targeting nucleotide sequence complimentary to a RNA sequence in the RNA transcript of the gene or a crRNA molecule comprising a targeting nucleotide sequence complimentary to a target RNA sequence in the RNA transcript of the gene.

[0395] In one embodiment, the method comprises administering to the subject (1) a nucleic acid molecule encoding a protein of the disclosure comprising a Cas protein and optionally a localization sequence, such as an NLS, NES, or organelle localization signal; and (2) a nucleic acid molecule encoding crRNA comprising a targeting nucleotide sequence complimentary to a RNA sequence in the RNA transcript of the gene or a crRNA molecule comprising a targeting nucleotide sequence complimentary to a target RNA sequence in the RNA transcript of the gene.

[0396] In one embodiment, the method comprises administering to the subject (1) a protein of the disclosure comprising a Cas protein and optionally a localization sequence, such as an NLS, NES, or organelle localization signal; and (2) a nucleic acid molecule encoding crRNA comprising a targeting nucleotide sequence complimentary to a RNA sequence in the RNA transcript of the gene or a crRNA molecule comprising a targeting nucleotide sequence complimentary to a target RNA sequence in the RNA transcript of the gene.

[0397] In one aspect, the present invention provides methods of treating a disease or disorder associated with RNA. For example, in one embodiment, the invention provides a method of treating an RNA virus infection. In one embodiment, the method comprises administering to the subject (1) a nucleic acid molecule encoding a protein of the disclosure comprising a Cas protein and optionally a localization sequence, such as an NLS, NES, or organelle localization signal, or a protein of the disclosure comprising a Cas protein and optionally a localization sequence, such as an NLS, NES, or organelle localization signal; and (2) a nucleic acid molecule encoding crRNA comprising a targeting nucleotide sequence complimentary to a RNA sequence in the viral RNA or a crRNA molecule comprising a targeting nucleotide sequence complimentary to a target RNA sequence in the viral RNA. In one embodiment, the Cas protein binds the crRNA, the crRNA binds a target RNA sequence, and Cas cleaves the RNA sequence thereby preventing translation and expression of viral protein.

[0398] In one embodiment, the method comprises administering to the subject (1) a nucleic acid molecule encoding a protein of the disclosure comprising a Cas protein and optionally a localization sequence, such as an NLS, NES, or organelle localization signal; and (2) a nucleic acid molecule encoding crRNA comprising a targeting nucleotide sequence complimentary to a RNA sequence in the viral RNA or a crRNA molecule comprising a targeting nucleotide sequence complimentary to a target RNA sequence in the viral RNA.

[0399] In one embodiment, the method comprises administering to the subject (1) a protein of the disclosure comprising a Cas protein and optionally a localization sequence, such as an NLS, NES, or organelle localization signal; and (2) a nucleic acid molecule encoding crRNA comprising a targeting nucleotide sequence complimentary to a RNA sequence in the viral RNA or a crRNA molecule comprising a targeting nucleotide sequence complimentary to a target RNA sequence in the viral RNA.

### Methods of Treatment and Use

[0400] The present invention provides methods of treating, reducing the symptoms of, and/or reducing the risk of developing a disease or disorder in a subject. For example, in one embodiment, methods of the invention of treat, reduce the symptoms of, and/or reduce the risk of developing a disease or disorder in a mammal. In one embodiment, the methods of the invention of treat, reduce the symptoms of, and/or reduce the risk of developing a disease or disorder in a plant. In one embodiment, the methods of the invention of treat, reduce the symptoms of, and/or reduce the risk of developing a disease or disorder in a yeast organism.

[0401] In one embodiment, the subject is a cell. In one embodiment, the cell is a prokaryotic cell or eukaryotic cell. In one embodiment, the cell is a eukaryotic cell. In one embodiment, the cell is a plant, animal, or fungi cell. In one embodiment, the cell is a plant cell. In one embodiment, the cell is an animal cell. In one embodiment, the cell is a yeast cell.

[0402] In one embodiment, the subject is a mammal. For example, in one embodiment, the subject is a human, non-human primate, dog, cat, horse, cow, goat, sheep, rabbit, pig, rat, or mouse. In one embodiment, the subject is a non-mammalian subject. For example, in one embodiment, the subject is a zebrafish, fruit fly, or roundworm.

[0403] In one embodiment, the disease or disorder is caused by one or more mutations in a genomic locus. Thus, in one embodiment, the disease or disorder is may be treated, reduced, or the risk can be reduced via an element that prevents or reduces mRNA transcript, or prevents or reduces translation of the protein. Thus, in one embodiment, the method comprises manipulation of an RNA transcript.

[0404] In one embodiment, the disease or disorder is caused by abnormal RNA. Thus, in one embodiment, the disease or disorder is may be treated, reduced, or the risk can be reduced via an element that prevents or reduces RNA transcript. Thus, in one embodiment, the method comprises manipulation of an RNA transcript.

[0405] In one embodiment, the method comprises administering to the subject (1) a protein of the disclosure or a nucleic acid molecule encoding a protein of the disclosure, and (2) one or crRNA comprising a targeting nucleotide sequence complimentary to a target region in a gene, wherein the gene encodes the RNA transcript. In one embodiment, the Cas protein cleaves the RNA transcript. In one embodiment, the method comprises administering to the subject (1) a protein of the disclosure or a nucleic acid molecule encoding a protein of the disclosure, and (2) one or crRNA comprising a sequence complimentary to a target region in an RNA transcript. In one embodiment, the Cas protein cleaves the RNA transcript.

[0406] In one embodiment, the disease or disorder is associated with abnormal RNA or increased RNA transcription. For example, in one embodiment, the disease or disorder is an endocrine disease. For example, in one embodiment, endocrine diseases include but are not limited to, β-thalassemias, neonatal diabetes, IPEX syndrome, Mayer-Rokitanski-Küster-Hausersyndrome, Hypothalamic-pituitary-adrenal axis dysregulation, Adrenal dysfunction, Gonadal dysfunction, Ectopic Cushing syndrome, Pre-eclampsia, Diabetic nephropathy, Type I diabetes, Type II diabetes, and IGF-1 deficiency.

[0407] In one embodiment, the disease or disorder is a tumorigenic disease. For example, in one embodiment, tumorigenic diseases include but are not limited to, mantle cell lymphoma, hereditary & sporadic parathyroid tumors, Medullary thyroid carcinoma, poliverative conditions, colorectal cancer, gliblastoma, Chronic lymphocytic leukemia, and Breast cancer.

[0408] In one embodiment, the disease or disorder is a neurological disease or disorder. For example, in one embodiment, neurological diseases include but are not limited to, Parkinsons diseases, Oculopharyngeal muscular dystrophy, Huntington's disease, Fabry disease, Fragile X syndrome, spinal muscular atrophy, Amyotrophic Lateral Sclerosis, Spinocerebellar ataxia Spinocerebellar ataxia 1, Spinocerebellar ataxia 2, Spinocerebellar ataxia 3, Spinocerebellar ataxia 6, Spinocerebellar ataxia 7, Spinocerebellar ataxia 8, Spinocerebellar ataxia 10, Spinocerebellar ataxia 17, Spinocerebellar ataxia 31, and Alzheimer's disease.

[0409] In one embodiment, the disease or disorder is a hematological disease or disorder. For example, in one embodiment, hematological diseases include but are not limited to, β-Thalassemia, and α-Thalassemia.

[0410] In one embodiment, the disease or disorder is an infection or immunological disease or disorder. For example, in one embodiment, infection or immunological diseases include but are not limited to, B-cell differentiation, T-cell activation, systemic lupus erythematosus, Wiskott-Aldrich syndrome, Osteoarthritis, scleroderma, and IPEX syndrome.

[0411] In one embodiment, the disease or disorder is a musculoskeletal disease or disorder. For example, in one embodiment, infection or immunological diseases include Myotonic dystrophy type 1, Spinal and bulbar muscular atrophy, and Dentatorubral-pallidoluysian atrophy.

[0412] Exemplary diseases or disorders and corresponding targets include, but are not limited to those listed in Table 1. Additional diseases and disorders and corresponding genes are known in the art, for example in Rehfeld et al., Alternations in Polyadenylation and its Implications for Endocrine Disease, Front. Endocrinol. 4:53 (2013), Chang et al., Alternative Polyadenylation in Human Diseases, Endocrinol Metab. 32:413-421 (2017), and Curinha et al., Implications of polyadenylation in health and disease, Nucleus 5:508-519 (2014), which are herein incorporated by reference in their entireties.

TABLE 1
Diseases or disorders and target gene

| Condition | Target |
|---|---|
| Adrenal dysfunction | STAR |
| Alzheimer's disease | ABCA3, EIF2B3, MSTO2P, OGDHL, |
| | PARP6, SLC33A1, SUPV3L1, TAF3, |
| | WASH7P, JAK1, ABCA3, UBR1, ALDOC, |
| | C10ord10, GABARAPL2, KAT2A, POLR3A, |
| | SH3BGRL2, TIMM23, TMC6, UNC80, |
| | WTAP |
| Amyotrophic Lateral Sclerosis | ALS (GGGGCC repeat), CCDC92, CRYAB, |
| | MAP7D2, PRPH, RTN4, SEC22B, SNAP25, |
| | UCHL1, YWHAB, C14ord2, C6orf203, |
| | ALDOC, ARL6IP1, CSDE1, CMC2, GAP43, |
| | LDHB, MLLT11, NCL, PFN2, TMOD1, |
| | VAMP1 |
| B-cell differentiation | IGHM |
| Breast cancer | |
| Cancer, Colorectal | DMKN, PDXK, PPIE |
| Cancer, Various | TP53 |
| Chronic lymphocytic leukaemia | Intronic loci |
| Colorectal cancer | DMKN, PDXK, PPIE |
| Dentatorubral-pallidoluysian atrophy | DRPLA (CAG repeat) |
| Diabetic nephropathy | HGRG-14 |
| Ectopic Cushing syndrome | ACTH |
| Fabry disease | α-GalA |
| Fragile X Syndrome | FMR1, FXTAS (CGG repeat) |
| Friedreich's Ataxia | YSH1 |
| Glioblastoma | CCND1, MECP2 |
| Gonadal dysfunction | STAR |
| Huntington's disease | HTT, HD (CAG repeat) |
| Huntington's disease-like 2 | HDL2 (CTG repeat) |
| Hypothalamic-pituitary-adrenal axis | SERT |
| dysregulation | |
| IGF-1 deficiency | IGF-1 |
| IPEX syndrome | FOP3 |
| Mayer-Rokitanski-Küster- | AMH |
| Hausersyndrome | |
| Myotonic Dystrophy Type I | DMPK, DM1 (CTG Repeat), DM2 (CCTG |
| | repeat) |
| Myotonic Dystrophy Type II | ZFN9 |
| Neonatal diabetes | INS |
| Oculopharyngeal muscular dystrophy | CCND1, PABPN1 |
| Parkinson disease | SNCA |
| Pre-eclampsia | SFLT-1 |
| Proliferative conditions | RBX1 |
| Spinal Muscular Atrophy | SMN |
| Spinocerebellar Ataxia 1 | ATXN1, SCA1 (CAG repeat) |
| Spinocerebellar Ataxia 10 | ATXN10, SCA10 (ATTCT repeat) |
| Spinocerebellar Ataxia 17 | TATA-box binding protein, SCA17 (CAG |
| | repeat) |
| Spinocerebellar Ataxia 2 | ATXN2, SCA2 (CAG repeat) |
| Spinocerebellar Ataxia 3 | ATXN3, SCA3 (CAG repeat) |
| Spinocerebellar Ataxia 31 | BEAN1, SCA31 (TGGA repeat) |
| Spinocerebellar Ataxia 6 | CACNA1A, SCA6 (CAG repeat) |
| Spinocerebellar Ataxia 7 | TPP1, SCA7 (CAG repeat) |
| Spinocerebellar Ataxia 8 | ATXN8OS, SCA8 (CTG/CAG repeat) |
| Spinal and bulbar muscular atrophy | SBMA (CAG repeat) |
| Steroidogenesis | STAR |
| Systemic lupus erythematosus | GIMAP5, IRF5 |
| T-cell activation | NF-ATC1 |
| Thrombophilia | F2 |
| Type I diabetes | GIMAP5 |
| Type II diabetes | TCF7L2 |
| Wiskott-Aldrich Syndrome | WAS |
| α-Thalassemia | HBA1, HBA2 |
| β-Thalassemia | HBB |

[0413] In one embodiment, the disease or disorder is a viral infection. Thus, in one embodiment, the disease or disorder is may be treated, reduced, or the risk can be reduced via an element that prevents or reduces viral mRNA transcript, or prevents or reduces translation of viral protein. Thus, in one embodiment, the method comprises manipulation of a viral RNA transcript.

[0414] In one embodiment, the method comprises administering to the subject (1) a protein of the disclosure or a nucleic acid molecule encoding a protein of the disclosure, and (2) one or more crRNA comprising a nucleotide sequence complimentary to a viral RNA transcript. In one embodiment, the Cas protein cleaves the viral RNA transcript.

[0415] In one embodiment, the virus is an RNA virus. In one embodiment, the virus produces RNA during its lifecycle. In one embodiment, the virus is a human virus, a plant virus or an animal virus. Exemplary viruses include, but are not limited to, viruses of families Adenoviridae, Adenoviridae, Alphaflexiviridae, Anelloviridae, Arenavirus, Arteriviridae, Asfarviridae, Astroviridae, Benyviridae, Betaflexiviridae, Birnaviridae, Bornaviridae, Bromoviridae, Caliciviridae, Caulimoviridae, Circoviridae, Closteroviridae, Coronaviridae, Filoviridae, Flaviviridae, Geminiviridae, Hantaviridae, Hepadnaviridae, Hepeviridae, Herpesviridae, Kitaviridae, Luteoviridae, Nairoviridae, Nanoviridae, Nimaviridae, Orthomyxoviridae, Paramyxoviridae, Phenuiviridae, Picornaviridae, Polyomaviridae, Pospiviridae, Potyviridae, Poxviridae, Reoviridae, Retroviridae, Retrovirus, Rhabdoviridae, Secoviridae, Togaviridae, Tombusviridae, Tospoviridae, Tymoviridae, and Virgaviridae. For example, exemplary viruses include, but are not limited to, African swine fever, Avian hepatitis E, Avian infectious laryngotracheitis, Avian nephritis virus, Bamboo mosaic virus, Banana bunchy top virus, Barley stripe mosaic virus, Barley yellow dwarf virus, Potato leafroll virus, Borna disease, Brome mosaic virus, wheat, Cauliflower mosaic virus, Chikungunya, Eastern equine encephalitis virus, Citrus leprosis, Citrus sudden death associated virus, Citrus tristeza virus, Coconut cadang-cadang viroid, Curly top virus, African cassava mosaic virus, Cytomegalovirus, Epstein-Barr virus, Dengue, Yellow fever, West Nile, Zika, Ebola virus, Marburg virus, Equine arteritis virus, Porcine reproductive and respiratory syndrome virus, Equine infectious anemia, Foot and mouth disease, Foot and mouth disease, Enteroviruses, Rhinoviruses, Hepatitis B virus, Hepatitis E virus, HIV, HIV-1, HIV-2, Infectious bursal disease virus (poultry), Infectious pancreatic necrosis (salmon), Infectious canine hepatitis, aviadenoviruses of fowl, Influenza viruses, Lassa virus, Lymphocytic choriomeningitis virus, Monkeypox, Nairobi sheep disease, Newcastle disease virus (poultry), Norwalk virus, Numerous examples of crop damaging viruses, including Potato virus Y, Porcine circovirus 2, Beak and feather disease virus (poultry), Potato virus M, Rabies virus, Respiratory and enteric adenoviruses, Respiratory syncytial virus, Rice stripe necrosis virus, Rift Valley fever, rotaviruses, SARS-CoV-2, MERS, Sheeppox virus, Lumpy skin disease virus, Sin Nombre virus, Andes virus, SV40, Tobacco ringspot virus, Tomato bushy stunt virus, Tomato spotted wilt virus, Torque teno virus, Venezuelan equine encephalitis virus, Vesicular stomatitis Indiana virus, Viral hemorrhagic septicemia (trout), and White spot syndrome virus (shrimp).

[0416] In one embodiment, exemplary viruses include, but are not limited to, Primate T-lymphotropic virus 1, Primate T-lymphotropic virus 2, Primate T-lymphotropic virus 3, Human immunodeficiency virus 1, Human immunodeficiency virus 2, Simian foamy virus, Human picobirnavirus, Colorado tick fever virus, Changuinola virus, Great Island virus, Lebombo virus, Orungo virus, Rotavirus A, Rotavirus B, Rotavirus C, Banna virus, Borna disease virus, Lake Victoria Marburgvirus, Reston ebolavirus, Sudan ebolavirus, Tai forest ebolavirus, Zaire virus, Human parainfluenza virus 2, Human parainfluenza virus 4, Mumps virus, Newcastle disease virus, Human parainfluenza virus 1, Human parainfluenza virus 3, Hendra virus, Nipah virus, Measles virus, Human respiratory syncytial virus, Human metapneumovirus, Chandipura virus, Isfahan virus, Piry virus, Vesicular stomatitis Alagoas virus, Vesicular stomatitis Indiana virus, Vesicular stomatitis New Jersey virus, Australian bat lyssavirus, Duvenhage virus, European bat lyssavirus 1, European bat lyssavirus 2, Mokola virus, Rabies virus, Guanarito virus, Junin virus, Lassa virus, Lymphocytic choriomeningitis virus, Machupo virus, Pichinde virus, Sabia virus, Whitewater Arroyo virus, Bunyamwera virus, Bwamba virus, California encephalitis virus, Caraparu virus, Catu virus, Guama virus, Guaroa virus, Kairi virus, Marituba virus, Oriboca virus, Oropouche virus, Shuni virus, Tacaiuma virus, Wyeomyia virus, Andes virus, Bayou virus, Black creek canal virus, Dobrava-Belgrade virus, Hantaan virus, Laguna Negra virus, New York virus, Puumala virus, Seoul virus, Sin Nombre virus, Crimean-Congo haemorrhagic fever virus, Dugbe virus, Candiru virus, Punta Toro virus, Rift Valley fever virus, Sandfly fever Naples virus, Influenza A virus, Influenza B virus, Influenza C virus, Dhori virus, Thogoto virus, Hepatitis delta virus, Human coronavirus 229E, Human coronavirus NL63, Human coronavirus HKU1, Human coronavirus OC43, SARS coronavirus, Human torovirus, Human enterovirus A, Human enterovirus B, Human enterovirus C, Human enterovirus D, Human rhinovirus A, Human rhinovirus B, Human rhinovirus C, Encephalomyocarditis virus, Theilovirus, Equine rhinitis A virus, Foot and mouth disease virus, Hepatitis A virus, Human parechovirus, Ljungan virus, Aichi virus, Human astrovirus, Human astrovirus 2, Human astrovirus 3, Human astrovirus 4, Human astrovirus 5, Human astrovirus 6, Human astrovirus 7, Human astrovirus 8, Norwalk virus, Sapporo virus, Aroa virus, Banzi virus, Dengue virus, Ilheus virus, Japanese encephalitis virus, Kokobera virus, Kyasanur forest disease virus, Louping ill virus, Murray Valley encephalitis virus, Ntaya virus, Omsk haemorrhagic fever virus, Powassan virus, Rio Bravo virus, St Louis encephalitis virus, Tick-borne encephalitis virus, Usutu virus, Wesselsbron virus, West Nile virus, Yellow fever virus, Zika virus, Hepatitis C virus, Hepatitis E virus, Barmah Forest virus, Chikungunya virus, Eastern equine encephalitis virus, Everglades virus, Getah virus, Mayaro virus, Mucambo virus, O'nyong-nyong virus, Pixuna virus, Ross River virus, Semliki Forest virus, Sindbis virus, Venezuelan equine encephalitis virus, Western equine encephalitis virus, Whataroa virus, Rubella virus.

[0417] In one embodiment, exemplary viruses include, but are not limited to, Ranid herpesvirus 1, Ranid herpesvirus 2, Ranid herpesvirus 3, Anguillid herpesvirus 1, Cyprinid herpesvirus 1, Cyprinid herpesvirus 2, Cyprinid herpesvirus 3, Acipenserid herpesvirus 2, Ictalurid herpesvirus 1, Ictalurid herpesvirus 2, Salmonid herpesvirus 1, Salmonid herpesvirus 2, Salmonid herpesvirus 3, Gallid alphaherpesvirus 1, Psittacid alphaherpesvirus 1, Anatid alphaherpesvirus 1, Columbid alphaherpesvirus 1, Gallid alphaherpesvirus 2, Gallid alphaherpesvirus 3, Meleagrid alphaherpesvirus 1, Spheniscid alphaherpesvirus 1, Chelonid alphaherpesvirus 5, Testudinid alphaherpesvirus 3, Ateline alphaherpesvirus 1, Bovine alphaherpesvirus 2, Cercopithecine alphaherpesvirus 2, Human alphaherpesvirus 1, Human alphaherpesvirus 2, Leporid alphaherpesvirus 4, Macacine alphaherpesvirus 1, Macropodid alphaherpesvirus 1, Macropodid alphaherpesvirus 2, Panine alphaherpesvirus 3, Papiine alphaherpesvirus 2, Pteropodid alphaherpesvirus 1, Saimiriine alphaherpesvirus 1, Bovine alphaherpesvirus 1, Bovine alphaherpesvirus 5, Bubaline alphaherpesvirus 1, Canid alphaherpesvirus 1, Caprine alphaherpesvirus 1, Cercopithecine alphaherpesvirus 9, Cervid alphaherpesvirus 1, Cervid alphaherpesvirus 2, Equid alphaherpesvirus 1, Equid alphaherpesvirus 3, Equid alphaherpesvirus 4, Equid alphaherpesvirus 8, Equid alphaherpesvirus 9, Felid alphaherpesvirus 1, Human alphaherpesvirus 3, Monodontid alphaherpesvirus 1, Phocid alphaherpesvirus 1, Suid alphaherpesvirus 1, Chelonid alphaherpesvirus 6, Aotine betaherpesvirus 1, Cebine betaherpesvirus 1, Cercopithecine betaherpesvirus 5, Human betaherpesvirus 5, Macacine betaherpesvirus 3, Macacine betaherpesvirus 8, Mandrilline betaherpesvirus 1, Panine betaherpesvirus 2, Papiine betaherpesvirus 3, Papiine betaherpesvirus 4, Saimiriine betaherpesvirus 4, Murid betaherpesvirus 1, Murid betaherpesvirus 2, Murid betaherpesvirus 8, Elephantid betaherpesvirus 1, Elephantid betaherpesvirus 4, Elephantid betaherpesvirus 5, Human betaherpesvirus 7, Human betaherpesvirus 6A, Human betaherpesvirus 6B, Macacine betaherpesvirus 9, Murid betaherpesvirus 3, Suid betaherpesvirus 2, Caviid betaherpesvirus 2, Tupaiid betaherpesvirus 1, Callitrichine gammaherpesvirus 3, Cercopithecine gammaherpesvirus 14, Gorilline gammaherpesvirus 1, Human gammaherpesvirus 4, Macacine gammaherpesvirus 4, Macacine gammaherpesvirus 10, Panine gammaherpesvirus 1, Papiine gammaherpesvirus 1, Pongine gammaherpesvirus 2, Alcelaphine gammaherpesvirus 1, Alcelaphine gammaherpesvirus 2, Bovine gammaherpesvirus 6, Caprine gammaherpesvirus 2, Hippotragine gammaherpesvirus 1, Ovine gammaherpesvirus 2, Suid gammaherpesvirus 3, Suid gammaherpesvirus 4, Suid gammaherpesvirus 5, Equid gammaherpesvirus 2, Equid gammaherpesvirus 5, Felid gammaherpesvirus 1, Mustelid gammaherpesvirus 1, Phocid gammaherpesvirus 3, Vespertilionid gammaherpesvirus 1, Ateline gammaherpesvirus 2, Ateline gammaherpesvirus 3, Bovine gammaherpesvirus 4, Cricetid gammaherpesvirus 2, Human gammaherpesvirus 8, Macacine gammaherpesvirus 5, Macacine gammaherpesvirus 8, Macacine gammaherpesvirus 11, Macacine gammaherpesvirus 12, Murid gammaherpesvirus 4, Murid gammaherpesvirus 7, Saimiriine gammaherpesvirus 2, Equid gammaherpesvirus 7, Phocid gammaherpesvirus 2, Saguinine gammaherpesvirus 1, Iguanid herpesvirus 2, Haliotid herpesvirus 1, Ostreid herpesvirus 1, Salmonella virus SKML39, Shigella virus AG3, Dickeya virus Limestone, Dickeya virus RC2014, Escherichia virus CBA120, Escherichia virus Phax1, Salmonella virus 38, Salmonella virus Det7, Salmonella virus GG32, Salmonella virus PM10, Salmonella virus SFP10, Salmonella virus SH19, Salmonella virus SJ3, Escherichia virus KWBSE43-6, Klebsiella virus 0507KN21, Klebsiella virus KpS110, Klebsiella virus May, Klebsiella virus Menlow, Serratia virus IME250, Erwinia virus Ea2809, Serratia virus MAM1, Acinetobacter virus Acibe1007, Acinetobacter virus AB3, Acinetobacter virus AbKT21III, Acinetobacter virus Abp1, Acinetobacter virus Aci07, Acinetobacter virus Aci08, Acinetobacter virus AS11, Acinetobacter virus AS12, Acinetobacter virus Fri1, Acinetobacter virus IME200, Acinetobacter virus PD6A3, Acinetobacter virus PDAB9, Acinetobacter virus phiAB1, Acinetobacter virus SH-Ab 15519, Acinetobacter virus SWHAb1, Acinetobacter virus SWHAb3, Acinetobacter virus WCHABP5, Acintetobacter virus B1, Acintetobacter virus B2, Acintetobacter virus B5, Acintetobacter virus D2, Acintetobacter virus P1, Acintetobacter virus P2, Acintetobacter virus phiAB6, Acinetobacter virus Petty, Vibrio virus Vc1, Vibrio virus A318, Vibrio virus AS51, Vibrio virus Vp670, Marinomonas virus CBSA, Marinomonas virus CPP1m, Vibrio virus VEN, Pseudomonas virus Achelous, Pseudomonas virus Alpheus, Pseudomonas virus Nerthus, Pseudomonas virus Njord, Pseudomonas virus uligo, Pseudomonas virus C171, Pectobacterium virus PP16, Pectobacterium virus PPWS1, Pectobacterium virus PPWS2, Pectobacterium virus CBS, Pectobacterium virus Clickz, Pectobacterium virus fM1, Pectobacterium virus Gaspode, Pectobacterium virus Khlen, Pectobacterium virus Koot, Pectobacterium virus Lelidair, Pectobacterium virus Nobby, Pectobacterium virus Peat1, Pectobacterium virus Phoria, Pectobacterium virus PP90, Pectobacterium virus Zenivior, Dickeya virus BF25-12, Pseudomonas virus NV3, Pseudomonas virus 130-113, Pseudomonas virus 15pyo, Pseudomonas virus Ab05, Pseudomonas virus ABTNL, Pseudomonas virus DL62, Pseudomonas virus kF77, Pseudomonas virus LKD16, Pseudomonas virus LUZ19, Pseudomonas virus MPK6, Pseudomonas virus MPK7, Pseudomonas virus NFS, Pseudomonas virus PAXYB1, Pseudomonas virus phiKMV, Pseudomonas virus PT2, Pseudomonas virus PTS, Pseudomonas virus RLP, Pseudomonas virus LKA1, Pseudomonas virus f2, Aeromonas virus 25AhydR2PP, Aeromonas virus AS7, Aeromonas virus ZPAH7, Yersinia virus ISAO8, Aeromonas virus Ahp1, Aeromonas virus CF7, Cronobacter virus DevCD23823, Cronobacter virus GAP227, Salmonella virus Spp16, Yersinia virus R8-01, Yersinia virus fHeYen301, Yersinia virus Phi80-18, Pectobacterium virus Arno160, Pectobacterium virus PP2, Proteus virus PM85, Proteus virus PM93, Proteus virus PM116, Proteus virus Pm5460, Pectobacterium virus PP1, Erwinia virus Era103, Erwinia virus S2, Lelliottia virus phD2B, Citrobacter CrRp3, Escherichia virus LL11, Escherichia virus AAPEc6, Escherichia virus ACGC91, Escherichia virus B, Escherichia virus C, Escherichia virus K, Escherichia virus K1-5, Escherichia virus K1E, Escherichia virus mutPK1A2, Escherichia virus VEc3, Escherichia virus UAB78, Salmonella virus BP12B, Salmonella virus SP6, Burkholderia virus BpAMP1, Ralstonia virus RSPI1, Ralstonia virus RSB1, Ralstonia virus RsoP1IDN, Burkholderia virus JG068, Ralstonia virus RSJ2, Ralstonia virus RSJS, Ralstonia virus RSPII1, Shigella virus Buco, Escherichia virus Minorna, Klebsiella virus AltoGao, Klebsiella virus BO1E, Klebsiella virus F19, Klebsiella virus K244, Klebsiella virus Kp2, Klebsiella virus KP34, Klebsiella virus KPRio2015, Klebsiella virus KpS2, Klebsiella virus KpV41, Klebsiella virus KpV48, Klebsiella virus KpV71, Klebsiella virus KpV74, Klebsiella virus KpV475, Klebsiella virus KPV811, Klebsiella virus myPSH1235, Klebsiella virus SU503, Klebsiella virus SU552A, Shigella virus SFN6B, Enterobacter virus KDA1, Proteus virus PM16, Proteus virus PM75, Dickeya virus Dagda, Dickeya virus Katbat, Dickeya virus Luksen, Dickeya virus Mysterion, Yersinia virus AP10, Erwinia virus FE44, Escherichia virus 285P, Escherichia virus BA14, Escherichia virus P483, Escherichia virus P694, Escherichia virus 5523, Kluyvera virus Kvp1, Pectobacterium virus PP74, Salmonella virus BP12A, Salmonella virus BSP161, Shigella virus A7, Yersinia virus Berlin, Yersinia virus PYPS50, Yersinia virus Yepe2, Yersinia virus Yepf, Citrobacter virus CR8, Vibrio virus ICP3, Vibrio virus N4, Vibrio virus VP4, Enterobacter virus Eap1, Erwinia virus L1, Escherichia virus SRT7, Pseudomonas virus 17A, Pseudomonas virus gh1, Pseudomonas virus Henninger, Pseudomonas virus KNP, Pseudomonas virus Pf1ERZ2017, Pseudomonas virus PhiPSA2, Pseudomonas virus PhiPsa17, Pseudomonas virus PPPL1, Pseudomonas virus sh12, Pseudomonas virus WRT, Yersinia virus fPS9, Yersinia virus fPS53, Yersinia virus fPS59, Yersinia virus fPS54ocr, Pectobacterium virus Jarilo, Citrobacter virus CR44b, Citrobacter virus SH3, Citrobacter virus SH4, Cronobacter virus Dev2, Cronobacter virus GW1, Enterobacter virus EcpYZU01, Escherichia virus EcoDS1, Escherichia virus F, Escherichia virus GA2A, Escherichia virus IMM002, Escherichia virus K1F, Escherichia virus LM33P1, Escherichia virus PE3-1, Escherichia virus Ro451w, Escherichia virus ST31, Escherichia virus Vec13, Escherichia virus YZ1, Escherichia virus ZG49, Shigella virus SFPH2, Morganella virus MmP1, Morganella virus MP2, Dickeya virus JA10, Dickeya virus Ninurta, Pectobacterium virus PP47, Pectobacterium virus PP81, Pectobacterium virus PPWS4, Pseudomonas virus PPpW4, Pseudomonas virus 22PfluR64PP, Pseudomonas virus IBBPF7A, Pseudomonas virus Pf10, Pseudomonas virus PFP1, Pseudomonas virus PhiS1, Pseudomonas virus UNOSLW1, Pseudomonas virus PspYZU08, Escherichia virus K30, Klebsiella virus 2044-307w, Klebsiella virus BIS33, Klebsiella virus Henu1, Klebsiella virus IL33, Klebsiella virus IME205, Klebsiella virus IME321, Klebsiella virus K5, Klebsiella virus K11, Klebsiella virus K5-2, Klebsiella virus K5-4, Klebsiella virus KN1-1, Klebsiella virus KN3-1, Klebsiella virus KN4-1, Klebsiella virus Kp1, Klebsiella virus KP32, Klebsiella virus KP32i192, Klebsiella virus KP32i194, Klebsiella virus KP32i195, Klebsiella virus KP32i196, Klebsiella virus kpssk3, Klebsiella virus KpV289, Klebsiella virus KpV763, Klebsiella virus KpV766, Klebsiella virus KpV767, Klebsiella virus Pharr, Klebsiella virus PRA33, Klebsiella virus SHKp152234, Klebsiella virus SHKp152410, Citrobacter virus CFP1, Citrobacter virus SH1, Citrobacter virus SH2, Enterobacter virus E2, Enterobacter virus E3, Enterobacter virus KPN3, Enterobacteria virus T7M, Escherichia virus ECA2, Escherichia virus LL2, Escherichia virus T3, Escherichia virus T3Luria, Leclercia virus 10164-302, Salmonella virus SG-JL2, Serratia virus 2050H2, Serratia virus SM9-3Y, Yersinia virus APS, Yersinia virus YeF10, Yersinia virus YeO3-12, Enterobacteria virus IME390, Escherichia virus 13a, Escherichia virus 64795ec1, Escherichia virus C5, Escherichia virus CICC80001, Escherichia virus Ebrios, Escherichia virus EG1, Escherichia virus HZ2R8, Escherichia virus HZP2, Escherichia virus N30, Escherichia virus NCA, Escherichia virus T7, Salmonella virus 3A8767, Salmonella virus Vi06, Stenotrophomonas virus IME15, Yersinia virus YpPY, Yersinia virus YpsPG, Pseudomonas virus Phi15, Pectobacterium virus DUPPII, Synechococcus virus SCBP42, Aquamicrobium virus P14, Ashivirus S45C4, Agrobacterium virus Atuph02, Agrobacterium virus Atuph03, Ralstonia virus Ap1, Ayaqvirus S45C18, Prochlorococcus virus SS120-1, Pseudomonas virus Andromeda, Pseudomonas virus Bf7, Escherichia virus J8-65, Escherichia virus Lidtsur, Prochlorococcus virus NATL1A7, Chosvirus KM23C739, Rhizobium virus RHEph02, Rhizobium virus RHEph08, Rhizobium virus RHEph09, Vibrio virus Cyclit, Escherichia virus PGT2, Escherichia virus PhiKT, Alteromonas virus H4-4, Foussvirus S46C10, Fussvirus S30C28, Escherichia virus ECBP5, Pectobacterium virus PP99, Ralstonia virus DURPI, Ralstonia virus RsoP1EGY, Synechococcus STIP37, Jalkavirus S08C159, Ralstonia virus RSB3, Kawavirus SWce1C56, Synechococcus virus SRIP1, Providencia virus PS3, Curvibacter virus P26059B, Ralstonia virus RSB2, Synechococcus virus SCBP2, Krakvirus S39C11, Podovirus Lau218, Pantoea virus LIMElight, Prochlorococcus virus PGSP1, Synechococcus virus SCBP3, Caulobacter virus Lullwater, Vibrio virus KF1, Vibrio virus KF2, Vibrio virus OWB, Vibrio virus VP93, Pseudomonas virus VSW3, Nohivirus S31C1, Oinezvirus S37C6, Rhizobium virus RHEph01, Pagavirus S05C849, Mesorhizobium virus Lo5R7ANS, Pedosvirus S28C3, Pekhitvirus S04C24, Pelagibacter virus HTVC019P, Pelagivirus S35C6, Caulobacter virus Percy, Delftia virus IMEDE1, Podivirus S05C243, Pseudomonas virus PollyC, Synechococcus virus SCBP4, Powvirus S08C41, Xanthomonas virus f20, Xanthomonas virus f30, Xanthomonas virus XAJ24, Xanthomonas virus Xc10, Xylella virus Prado, Synechococcus virus SB28, Sphingomonas virus Scott, Synechococcus virus SRIP2, Ralstonia virus ITL1, Sieqvirus S42C7, Ralstonia virus RPSC1, Stopalavirus S38C3, Pelagibacter virus HTVC011P, Stupnyavirus KM16C193, Prochlorococcus virus 951510a, Prochlorococcus virus NATL2A133, Prochlorococcus virus PSSP10, Vibrio virus JSF7, Prochlorococcus virus PSSP7, Synechococcus virus P60, Prochlorococcus virus PSSP3, Synechococcus virus PSSP2, Synechococcus virus Syn5, Votkovvirus S28C10, Pantoea virus LIMEzero, Pasteurella virus PHB01, Pasteurella virus PHB02, Escherichia virus GJ1, Escherichia virus ST32, Erwinia virus Faunus, Erwinia virus Y2, Aeromonas virus pAh6C, Pectobacterium virus PM1, Pectobacterium virus PP101, Shewanella virus Spp001, Shewanella virus SppYZU05, Vibrio virus Ceto, Vibrio virus Thalassa, Vibrio virus JSF10, Vibrio virus JSF12, Vibrio virus phi3, Vibrio virus pVp1, Escherichia virus EPS7, Escherichia virus mar003J3, Escherichia virus saus132, Salmonella virus 123, Salmonella virus 329, Salmonella virus 118970sa12, Salmonella virus LVR16A, Salmonella virus S113, Salmonella virus S114, Salmonella virus S116, Salmonella virus S124, Salmonella virus S126, Salmonella virus S132, Salmonella virus S133, Salmonella virus S147, Salmonella virus Seafire, Salmonella virus SH9, Salmonella virus STG2, Salmonella virus Stitch, Salmonella virus Sw2, Yersinia virus phiR201, Escherichia virus AKFV33, Escherichia virus BF23, Escherichia virus chee24, Escherichia virus DT5712, Escherichia virus DT57C, Escherichia virus FFH1, Escherichia virus Gostya9, Escherichia virus H8, Escherichia virus mar004NP2, Escherichia virus OSYSP, Escherichia virus phiAPCEc03, Escherichia virus phiLLS, Escherichia virus s1ur09, Escherichia virus T5, Salmonella virus NR01, Salmonella virus 5131, Salmonella virus Shivani, Salmonella virus SP01, Salmonella virus SP3, Salmonella virus SPC35, Shigella virus SHSML45, Shigella virus SSP1, Pectobacterium virus DUPPV, Pectobacterium virus My1, Proteus virus PM135, Proteus virus Stubb, Vibrio virus PG07, Vibrio virus VspSw1, Aeromonas virus AhSzq1, Aeromonas virus AhSzw1, Klebsiella virus IME260, Klebsiella virus Sugarland, Escherichia virus IME542, Escherichia virus ACGM12, Escherichia virus EC3a, Escherichia virus DTL, Escherichia virus IME253, Escherichia virus Rtp, Shigella virus Sf12, Escherichia virus phiEB49, Escherichia virus AHP42, Escherichia virus AHS24, Escherichia virus AKS96, Escherichia virus C119, Escherichia virus E41c, Escherichia virus Eb49, Escherichia virus Jk06, Escherichia virus KP26, Escherichia virus phiJLA23, Escherichia virus Rogue1, Shigella virus Sd1, Shigella virus pSf1, Citrobacter virus DK2017, Citrobacter virus Sazh, Citrobacter virus Stevie, Escherichia virus LLS, Escherichia virus TLS, Salmonella virus 36, Salmonella virus PHB07, Salmonella virus phSE2, Salmonella virus SP126, Salmonella virus YSP2, Escherichia virus 95, Escherichia virus mar001J1, Escherichia virus mar002J2, Escherichia virus SECphi27, Escherichia virus swan01, Escherichia virus IME347, Escherichia virus SRT8, Escherichia virus ADB2, Escherichia virus BIFF, Escherichia virus IME18, Escherichia virus JMPW1, Escherichia virus JMPW2, Escherichia virus SH2, Escherichia virus T1, Shigella virus 008, Shigella virus ISF001, Shigella virus PSf2, Shigella virus Sfin1, Shigella virus SH6, Shigella virus Shfl1, Shigella virus ISF002, Cronobacter virus Esp2949-1, Enterobacter virus EcL1, Cronobacter virus PhiCS01, Escherichia virus ESC041, Pantoea virus AAS23, Escherichia virus NBD2, Enterobacter virus F20, Klebsiella virus 1513, Klebsiella virus GHK3, Klebsiella virus KLPN1, Klebsiella virus KOX1, Klebsiella virus KP36, Klebsiella virus KpCol1, Klebsiella virus KpKT21phi1, Klebsiella virus KPN N141, Klebsiella virus KpV522, Klebsiella virus MezzoGao, Klebsiella virus NJR15, Klebsiella virus NJS1, Klebsiella virus NJS2, Klebsiella virus PKP126, Klebsiella virus Sushi, Klebsiella virus TAH8, Klebsiella virus TSK1, Bacillus virus Agate, Bacillus virus Bobb, Bacillus virus Bp8pC, Bacillus virus Bastille, Bacillus virus CAM003, Bacillus virus Evoli, Bacillus virus HoodyT, Bacillus virus AvesoBmore, Bacillus virus B4, Bacillus virus Bigbertha, Bacillus virus Riley, Bacillus virus Spock, Bacillus virus Troll, Bacillus virus Bc431, Bacillus virus Bcp1, Bacillus virus BCP82, Bacillus virus BM15, Bacillus virus Deepblue, Bacillus virus JBP901, Bacillus virus Grass, Bacillus virus NIT1, Bacillus virus SPG24, Bacillus virus BCP78, Bacillus virus TsarBomba, Bacillus virus BPS13, Bacillus virus BPS10C, Bacillus virus Hakuna, Bacillus virus Megatron, Bacillus virus WPh, Bacillus virus Mater, Bacillus virus Moonbeam, Bacillus virus SIOphi, Enterococcus virus ECP3, Enterococcus virus EF24C, Enterococcus virus EFLK1, Enterococcus virus EFDG1, Enterococcus virus EFP01, Enterococcus virus EfV12, Listeria virus A511, Listeria virus AG20, Listeria virus List36, Listeria virus LMSP25, Listeria virus LMTA34, Listeria virus LMTA148, Listeria virus LP048, Listeria virus LP064, Listeria virus LP083-2, Listeria virus P100, Listeria virus WIL1, Bacillus virus Camphawk, Bacillus virus SPO1, Bacillus virus CP51, Bacillus virus JL, Bacillus virus Shanette, Staphylococcus virus BS1, Staphylococcus virus BS2, Lactobacillus virus Bacchae, Lactobacillus virus Bromius, Lactobacillus virus Iacchus, Lactobacillus virus Lpa804, Lactobacillus virus Semele, Staphylococcus virus G1, Staphylococcus virus G15, Staphylococcus virus JD7, Staphylococcus virus K, Staphylococcus virus MCE2014, Staphylococcus virus P108, Staphylococcus virus Rodi, Staphylococcus virus 5253, Staphylococcus virus S25-4, Staphylococcus virus SA12, Staphylococcus virus Sb1, Staphylococcus virus SscM1, Staphylococcus virus IPLAC1C, Staphylococcus virus SEP1, Staphylococcus virus Remus, Staphylococcus virus SA11, Staphylococcus virus Stau2, Staphylococcus virus Twort, Brochothrix virus A9, Lactobacillus virus Lb338-1, Lactobacillus virus LP65, Campylobacter virus CP21, Campylobacter virus CP220, Campylobacter virus CPt10, Campylobacter virus IBB35, Campylobacter virus CP81, Campylobacter virus CP30A, Campylobacter virus CPX, Campylobacter virus Los1, Campylobacter virus NCTC12673, Escherichia virus Alf5, Escherichia virus AYO145A, Escherichia virus EC6, Escherichia virus HY02, Escherichia virus JH2, Escherichia virus TP1, Escherichia virus VpaE1, Escherichia virus wV8, Salmonella virus BPS15Q2, Salmonella virus BPS17L1, Salmonella virus BPS17W1, Salmonella virus FelixO1, Salmonella virus Mushroom, Salmonella virus Si3, Salmonella virus SP116, Salmonella virus UAB87, Erwinia virus Ea214, Erwinia virus M7, Citrobacter virus Moogle, Citrobacter virus Mordin, Shigella virus Sf13, Shigella virus Sf14, Shigella virus Sf17, Escherichia virus SUSP1, Escherichia virus SUSP2, Ralstonia virus RSA1, Ralstonia virus RSY1, Mannheimia virus 1127AP1, Mannheimia virus PHL101, Aeromonas virus phiO18P, Vibrio virus Canoe, Pseudoalteromonas virus C5a, Pseudomonas virus Dobby, Pseudomonas virus phiCTX, Erwinia virus EtG, Escherichia virus 186, Salmonella virus PsP3, Salmonella virus SEN1, Erwinia virus ENT90, Klebsiella virus 4LV2017, Salmonella virus Fels2, Salmonella virus RE2010, Salmonella virus SEN8, Salmonella virus SopEphi, Haemophilus virus HP1, Haemophilus virus HP2, Vibrio virus Kappa, Pasteurella virus F108, Burkholderia virus KS14, Burkholderia virus AP3, Burkholderia virus KS5, Vibrio virus K139, Burkholderia virus ST79, Escherichia virus fiAA91ss, Escherichia virus P2, Escherichia virus pro147, Escherichia virus pro483, Escherichia virus Wphi, Yersinia virus L413C, Pseudomonas virus phi3, Salinivibrio virus SMHB1, Klebsiella virus 3LV2017, Salmonella virus SEN4, Cronobacter virus ESSI2, Stenotrophomonas virus Smp131, Salmonella virus FSLSP004, Burkholderia virus KL3, Burkholderia virus phi52237, Burkholderia virus phiE122, Burkholderia virus phiE202, Vibrio virus PV94, Escherichia virus P88, Escherichia virus Bp7, Escherichia virus IME08, Escherichia virus JS10, Escherichia virus J598, Escherichia virus MX01, Escherichia virus QL01, Escherichia virus VR5, Escherichia virus WG01, Escherichia virus VR7, Escherichia virus VR20, Escherichia virus VR25, Escherichia virus VR26, Shigella virus SP18, Salmonella virus Melville, Salmonella virus S16, Salmonella virus STML198, Salmonella virus STP4a, Klebsiella virus JD18, Klebsiella virus PKO111, Enterobacter virus PG7, Escherichia virus CC31, Escherichia virus ECD7, Escherichia virus GEC3S, Escherichia virus JSE, Escherichia virus phi1, Escherichia virus RB49, Citrobacter virus CF1, Citrobacter virus Merlin, Citrobacter virus Moon, Escherichia virus APCEc01, Escherichia virus HP3, Escherichia virus HX01, Escherichia virus JS09, Escherichia virus 0157tp3, Escherichia virus 0157tp6, Escherichia virus PhAPEC2, Escherichia virus RB69, Escherichia virus ST0, Shigella virus SHSML521, Shigella virus UTAM, Vibrio virus KVP40, Vibrio virus nt1, Vibrio virus ValKK3, Enterobacter virus Eap3, Klebsiella virus KP15, Klebsiella virus KP27, Klebsiella virus Matisse, Klebsiella virus Miro, Klebsiella virus PMBT1, Escherichia virus AR1, Escherichia virus C40, Escherichia virus CF2, Escherichia virus E112, Escherichia virus ECML134, Escherichia virus HY01, Escherichia virus HY03, Escherichia virus Ime09, Escherichia virus RB3, Escherichia virus RB14, Escherichia virus s1ur03, Escherichia virus s1ur04, Escherichia virus T4, Shigella virus Pss1, Shigella virus Sf21, Shigella virus Sf22, Shigella virus Sf24, Shigella virus SHBML501, Shigella virus Shf12, Yersinia virus D1, Yersinia virus PST, Acinetobacter virus 133, Aeromonas virus 65, Aeromonas virus Aeh1, Escherichia virus RB16, Escherichia virus RB32, Escherichia virus RB43, Pseudomonas virus 42, Escherichia virus Av05, Cronobacter virus CR3, Cronobacter virus CR8, Cronobacter virus CR9, Cronobacter virus PBES02, Pectobacterium virus phiTE, Cronobacter virus GAP31, Escherichia virus 4MG, Salmonella virus PVPSE1, Salmonella virus SSE121, Escherichia virus APECc02, Escherichia virus FFH2, Escherichia virus FV3, Escherichia virus JES2013, Escherichia virus Murica, Escherichia virus slur16, Escherichia virus V5, Escherichia virus V18, Brevibacillus virus Abouo, Brevibacillus virus Davies, Synechococcus virus SMbCM100, Erwinia virus Deimos, Erwinia virus Desertfox, Erwinia virus Ea35-70, Erwinia virus RAY, Erwinia virus Simmy50, Erwinia virus SpecialG, Synechococcus virus SShM2, Klebsiella virus K64-1, Klebsiella virus RaK2, Dickeya virus AD1, Erwinia virus Alexandra, Lactobacillus virus LBR48, Synechococcus virus SCAM1, Synechococcus virus SCBWM1, Vibrio virus Aphrodite1, Escherichia virus 121Q, Escherichia virus PBECO4, Synechococcus virus AC2014fSyn7803C8, Synechococcus virus ACG2014f, Synechococcus virus ACG2014fSyn7803US26, Synechococcus virus STIM5, Pseudomonas virus PaBG, Rheinheimera virus Barba18A, Rheinheimera virus Barba19A, Rheinheimera virus Barba21A, Rheinheimera virus Barba5S, Rheinheimera virus Barba8S, Burkholderia virus BcepMu, Burkholderia virus phiE255, Synechococcus virus Bellamy, Gordonia virus GMA6, Aeromonas virus 44RR2, Mycobacterium virus Alice, Mycobacterium virus Bxz1, Mycobacterium virus Dandelion, Mycobacterium virus HyRo, Mycobacterium virus I3, Mycobacterium virus Lukilu, Mycobacterium virus Nappy, Mycobacterium virus Sebata, Faecalibacterium virus Brigit, Prochlorococcus virus Syn33, Synechococcus virus SRIM12-01, Synechococcus virus SRIM12-06, Synechococcus virus SRIM12-08, Salmonella virus SEN34, Acidovorax virus ACP17, Xanthomonas virus Carpasina, Xanthomonas virus XcP1, Pseudomonas virus pf16, Synechococcus virus SCAM3, Ralstonia virus RSF1, Ralstonia virus RSL2, Synechococcus virus SWAM2, Erwinia virus Derbicus, Pseudomonas virus EL, Sinorhizobium virus M7, Sinorhizobium virus M12, Sinorhizobium virus N3, Serratia virus BF, Yersinia virus Yen9-04, Faecalibacterium virus Epona, Erwinia virus Asesino, Erwinia virus EaH2, Prochlorococcus virus MED4-213, Prochlorococcus virus PHM1, Prochlorococcus virus PHM2, Flavobacterium virus FCL2, Flavobacterium virus FCV1, Pseudomonas virus KIL2, Pseudomonas virus KIL4, Edwardsiella virus GF2, Escherichia virus Goslar, Halomonas virus HAP1, Vibrio virus VP882, Lactobacillus virus Lb, Erwinia virus EaH1, Iodobacter virus PLPE, Delftia virus PhiW14, Klebsiella virus JD001, Klebsiella virus KpV52, Klebsiella virus KpV80, Escherichia virus CVM10, Escherichia virus EC0078, Escherichia virus ep3, Brevibacillus virus Jimmer, Brevibacillus virus Osiris, Synechococcus virus SCAM9, Rhizobium virus RHEph4, Faecalibacterium virus Lagaffe, Synechoccus virus SP4, Synechococcus virus Syn30, Prochlorococcus virus PTIM40, Synechococcus virus SSKS1, Salmonella virus ZCSE2, Clostridium virus phiC2, Clostridium virus phiCD27, Clostridium virus phiCD119, Erwinia virus Machina, Arthrobacter virus BarretLemon, Arthrobacter virus Beans, Arthrobacter virus Brent, Arthrobacter virus Jawnski, Arthrobacter virus Martha, Arthrobacter virus Piccoletto, Arthrobacter virus Shade, Arthrobacter virus Sonny, Synechococcus virus SCAM7, Acinetobacter virus ME3, Ralstonia virus RSL1, Cronobacter virus GAP32, Pectinobacterium virus CBB, Faecalibacterium virus Mushu, Escherichia virus Mu, Shigella virus SfMu, Halobacterium virus phiH, Burkholderia virus Bcep1, Burkholderia virus Bcep43, Burkholderia virus Bcep781, Burkholderia virus BcepNY3, Xanthomonas virus OP2, Synechococcus virus SMbCM6, Pseudomonas virus Ab03, Pseudomonas virus G1, Pseudomonas virus KPP10, Pseudomonas virus PAKP3, Pseudomonas virus PS24, Synechococcus virus SRIM8, Synechococcus virus SRIM50, Synechococcus virus ACG2014bSyn7803C61, Synechococcus virus ACG2014bSyn9311C4, Synechococcus virus SRIM2, Synechococcus virus SPM2, Pseudomonas virus Noxifer, Acinetobacter virus AB1, Acinetobacter virus AB2, Acinetobacter virus AbC62, Acinetobacter virus AbP2, Acinetobacter virus AP22, Acinetobacter virus LZ35, Acinetobacter virus WCHABP1, Acinetobacter virus WCHABP12, Pseudomonas virus Psa374, Pseudomonas virus VCM, Pseudomonas virus CAb1, Pseudomonas virus CAb02, Pseudomonas virus JG004, Pseudomonas virus MAGI, Pseudomonas virus PA10, Pseudomonas virus PAKP1, Pseudomonas virus PAKP2, Pseudomonas virus PAKP4, Pseudomonas virus PaP1, Pseudomonas virus phiMK, Pseudomonas virus Zigelbrucke, Prochlorococcus virus PSSM7, Burkholderia virus BcepF1, Pseudomonas virus 141, Pseudomonas virus Ab28, Pseudomonas virus CEBDP1, Pseudomonas virus DL60, Pseudomonas virus DL68, Pseudomonas virus E215, Pseudomonas virus E217, Pseudomonas virus F8, Pseudomonas virus JG024, Pseudomonas virus KPP12, Pseudomonas virus KTN6, Pseudomonas virus LBL3, Pseudomonas virus LMA2, Pseudomonas virus NH4, Pseudomonas virus PAS, Pseudomonas virus PB1, Pseudomonas virus PS44, Pseudomonas virus SN, Pectinobacterium virus PEAT2, Edwardsiella virus pEtSU, Bordetella virus PHB04, Escherichia phage ESCO13, Escherichia virus ESCO5, Escherichia virus phAPEC8, Escherichia virus Schickermooser, Klebsiella virus ZCKP1, Pseudomonas virus PA7, Pseudomonas virus phiKZ, Pseudomonas virus SL2, Pseudomonas virus PMW, Agrobacterium virus Atuph07, Synechococcus virus Syn19, Aeromonas virus 56, Aeromonas virus 43, Escherichia virus P1, Escherichia virus RCS47, Salmonella virus SJ46, Pseudoalteromonas virus J2-1, Arthrobacter virus ArV1, Arthrobacter virus Colucci, Arthrobacter virus Trina, Ralstonia virus RP12, Erwinia virus Risingsun, Salmonella virus BP63, Acinetobacter virus Aci05, Acinetobacter virus Aci01-1, Acinetobacter virus Aci02-2, Prochlorococcus virus PSSM2, Dickeya virus JA11, Dickeya virus JA29, Erwinia virus Y3, Agrobacterium virus 7-7-1, Salmonella virus SPN3US, Bacillus virus Shbh1, Bacillus virus 1, Geobacillus virus GBSV1, Pseudomonas virus tabernarius, Synechococcus virus ST4, Faecalibacterium virus Taranis, Synechococcus virus SIOM18, Yersinia virus R1RT, Yersinia virus TG1, Synechococcus virus STIM4, Synechococcus virus SSM1, Bacillus virus SP15, Vibrio virus pTD1, Vibrio virus VP4B, Tetrasphaera virus TJE1, Faecalibacterium virus Toutatis, Aeromonas virus 25, Aeromonas virus Aes12, Aeromonas virus Aes508, Aeromonas virus AS4, Aeromonas virus Asgz, Stenotrophomonas virus IME13, Prochlorococcus virus Syn1, Synechococcus virus SRIM44, Vibrio virus MAR, Vibrio virus VHML, Vibrio virus VP585, Escherichia virus ECML4, Salmonella virus Marshall, Salmonella virus Maynard, Salmonella virus SJ2, Salmonella virus STML131, Salmonella virus ViI, Erwinia virus Wellington, Escherichia virus ECML-117, Escherichia virus FEC19, Escherichia virus WFC, Escherichia virus WFH, Serratia virus CHI14, Edwardsiella virus MSW3, Edwardsiella virus PEi21, Erwinia virus Yoloswag, Bacillus virus G, Bacillus virus PBS1, Microcystis virus Ma-LMM01, Streptococcus virus Cp1, Streptococcus virus Cp1, Lactococcus virus WP2, Bacillus virus B103, Bacillus virus GA1, Bacillus virus phi29, Kurthia virus 6, Actinomyces virus Av1, Mycoplasma virus P1, Staphylococcus virus Andhra, Staphylococcus virus St134, Staphylococcus virus 66, Staphylococcus virus 44AHJD, Staphylococcus virus BP39, Staphylococcus virus CSA13, Staphylococcus virus GRCS, Staphylococcus virus Pabna, Staphylococcus virus phiAGO13, Staphylococcus virus PSa3, Staphylococcus virus S24-1, Staphylococcus virus SAP2, Staphylococcus virus SCH1, Staphylococcus virus SLPW, Shigella virus 7502Stx, Shigella virus POCJ13, Escherichia virus 191, Escherichia virus PA2, Escherichia virus TL2011, Shigella virus VASD, Escherichia virus 24B, Escherichia virus 933W, Escherichia virus Min27, Escherichia virus PA28, Escherichia virus Stx2 II, Dinoroseobacter virus DFL12, Pseudomonas virus Bjorn, Pseudomonas virus Ab22, Pseudomonas virus CHU, Pseudomonas virus LUZ24, Pseudomonas virus PAA2, Pseudomonas virus PaP3, Pseudomonas virus PaP4, Pseudomonas virus TL, Vibrio virus VC8, Vibrio virus VP2, Vibrio virus VP5, Escherichia virus N4, Flavobacterium virus Fpv1, Flavobacterium virus Fpv4, Streptococcus virus C1, Escherichia virus APEC5, Escherichia virus APEC7, Escherichia virus Bp4, Escherichia virus EC1UPM, Escherichia virus ECBP1, Escherichia virus G7C, Escherichia virus IME11, Shigella virus Sb1, Escherichia virus C1302, Pseudomonas virus F116, Pseudomonas virus H66, Escherichia virus Pollock, Salmonella virus FSL SP-058, Salmonella virus FSL SP-076, Arthrobacter virus Adat, Arthrobacter virus Jasmine, Erwinia virus Ea9-2, Erwinia virus Frozen, Achromobacter virus Axp3, Achromobacter virus JWAlpha, Edwardsiella virus KF1, Burkholderia virus KL4, Pseudomonas virus KPP25, Pseudomonas virus R18, Pseudomonas virus tf, Escherichia virus 172-1, Escherichia virus ECB2, Escherichia virus NJ01, Escherichia virus phiEco32, Escherichia virus Septima11, Escherichia virus SU10, Escherichia virus HK620, Salmonella virus BTP1, Salmonella virus P22, Salmonella virus SE1Spa, Salmonella virus ST64T, Shigella virus Sf6, Burkholderia virus Bcep22, Burkholderia virus Bcepi102, Burkholderia virus Bcepmigl, Burkholderia virus DC1, Cellulophaga virus Cba41, Cellulophaga virus Cba172, Pseudomonas virus Ab09, Pseudomonas virus LIT1, Pseudomonas virus PA26, Pseudomonas virus KPP21, Pseudomonas virus LUZ7, Vibrio virus 48B1, Vibrio virus 51A6, Vibrio virus 51A7, Vibrio virus 52B1, Myxococcus virus Mx8, Bacillus virus Page, Bacillus virus Palmer, Bacillus virus Pascal, Bacillus virus Pony, Bacillus virus Pookie, Brucella virus Pr, Brucella virus Tb, Bordetella virus BPP1, Burkholderia virus BcepC6B, Helicobacter virus 1961P, Helicobacter virus KHP30, Helicobacter virus KHP40, Pseudomonas virus phCDa, Escherichia virus Skarpretter, Escherichia virus Sortsne, Klebsiella virus IME279, Escherichia virus phiV10, Salmonella virus Epsilon15, Salmonella virus SPN1S, Pseudomonas virus NV1, Pseudomonas virus UFVP2, Escherichia virus PTXU04, Hamiltonella virus APSE1, Lactococcus virus KSY1, Phormidium virus WMP3, Phormidium virus WMP4, Pseudomonas virus 119X, Roseobacter virus SIO1, Vibrio virus VpV262, Streptomyces virus ELB20, Streptomyces virus R4, Streptomyces virus Amela, Streptomyces virus phiCAM, Streptomyces virus Aaronocolus, Streptomyces virus Caliburn, Streptomyces virus Danzina, Streptomyces virus Hydra, Streptomyces virus Izzy, Streptomyces virus Lannister, Streptomyces virus Lika, Streptomyces virus Sujidade, Streptomyces virus Zemlya, Streptomyces virus phiHau3, Mycobacterium virus Acadian, Mycobacterium virus Baee, Mycobacterium virus Reprobate, Mycobacterium virus Adawi, Mycobacterium virus Banel, Mycobacterium virus BrownCNA, Mycobacterium virus Chrisnmich, Mycobacterium virus Cooper, Mycobacterium virus JAMaL, Mycobacterium virus Nigel, Mycobacterium virus Stinger, Mycobacterium virus Vincenzo, Mycobacterium virus Zemanar, Mycobacterium virus Apizium, Mycobacterium virus Manad, Mycobacterium virus Oline, Mycobacterium virus Osmaximus, Mycobacterium virus Pg1, Mycobacterium virus Soto, Mycobacterium virus Suffolk, Mycobacterium virus Athena, Mycobacterium virus Bernardo, Mycobacterium virus Gadjet, Mycobacterium virus Pipefish, Mycobacterium virus Godines, Mycobacterium virus Rosebush, Mycobacterium virus TA17a, Mycobacterium virus Babsiella, Mycobacterium virus Brujita, Mycobacterium virus Hawkeye, Mycobacterium virus Plot, Caulobacter virus CcrBL9, Caulobacter virus CcrSC, Caulobacter virus CcrColossus, Caulobacter virus CcrPW, Caulobacter virus CcrBL10, Caulobacter virus CcrRogue, Caulobacter virus phiCbK, Caulobacter virus Swift, Salmonella virus SP31, Salmonella virus AG11, Salmonella virus Ent1, Salmonella virus f18SE, Salmonella virus Jersey, Salmonella virus L13, Salmonella virus LSPA1, Salmonella virus SE2, Salmonella virus SETP3, Salmonella virus SETP7, Salmonella virus SETP13, Salmonella virus SP101, Salmonella virus SS3e, Salmonella virus wks13, Escherichia virus K1G, Escherichia virus K1H, Escherichia virus K1ind1, Escherichia virus K1ind2, Escherichia virus Golestan, Raoultella virus RP180, Gordonia virus Asapag, Gordonia virus BENtherdunthat, Gordonia virus Getalong, Gordonia virus Kenna, Gordonia virus Horus, Gordonia virus Phistory, Leuconostoc virus Lmd1, Leuconostoc virus LN03, Leuconostoc virus LN04, Leuconostoc virus LN12, Leuconostoc virus LN6B, Leuconostoc virus P793, Leuconostoc virus 1A4, Leuconostoc virus Ln8, Leuconostoc virus Ln9, Leuconostoc virus LN25, Leuconostoc virus LN34, Leuconostoc virus LNTR3, Mycobacterium virus Bongo, Mycobacterium virus Rey, Mycobacterium virus Butters, Mycobacterium virus Michelle, Mycobacterium virus Charlie, Mycobacterium virus Pipsqueaks, Mycobacterium virus Xeno, Mycobacterium virus Panchino, Mycobacterium virus Phrann, Mycobacterium virus Redi, Mycobacterium virus Skinnyp, Gordonia virus BaxterFox, Gordonia virus Yeezy, Gordonia virus Kita, Gordonia virus Nymphadora, Gordonia virus Zirinka, Mycobacterium virus Bignuz, Mycobacterium virus Brusacoram, Mycobacterium virus Donovan, Mycobacterium virus Fishburne, Mycobacterium virus Jebeks, Mycobacterium virus Malithi, Mycobacterium virus Phayonce, Lactobacillus virus B2, Lactobacillus virus Lenus, Lactobacillus virus Nyseid, Lactobacillus virus SAC12, Lactobacillus virus Ldl1, Lactobacillus virus ViSo2018a, Lactobacillus virus Maenad, Lactobacillus virus P1, Lactobacillus virus Satyr, Streptomyces virus AbbeyMikolon, Pseudomonas virus Ab18, Pseudomonas virus Ab19, Pseudomonas virus PaMx11, Burkholderia virus AH2, Arthrobacter virus Amigo, Arthrobacteria virus Molivia, Propionibacterium virus Anatole, Propionibacterium virus B3, Arthrobacter virus Andrew, Bacillus virus Andromeda, Bacillus virus Blastoid, Bacillus virus Curly, Bacillus virus Eoghan, Bacillus virus Finn, Bacillus virus Glittering, Bacillus virus Riggi, Bacillus virus Taylor, Microbacterium virus Appa, Gordonia virus Apricot, Microbacterium virus Armstrong, Gordonia virus Attis, Streptomyces virus Attoomi, Streptomyces virus Austintatious, Streptomyces virus Ididsumtinwong, Streptomyces virus PapayaSalad, Gordonia virus Bantam, Mycobacterium virus Barnyard, Mycobacterium virus Konstantine, Mycobacterium virus Predator, Pseudomonas virus B3, Pseudomonas virus JBD67, Pseudomonas virus JD18, Pseudomonas virus PM105, Mycobacterium virus Bernal13, Gordonia virus BetterKatz, Streptomyces virus Bing, Staphylococcus virus 13, Staphylococcus virus 77, Staphylococcus virus 108PVL, Gordonia virus Bowser, Arthrobacter virus Bridgette, Arthrobacter virus Constance, Arthrobacter virus Eileen, Arthrobacter virus Judy, Arthrobacter virus Peas, Gordonia virus Britbrat, Mycobacterium virus Bron, Mycobacterium virus Faith1, Mycobacterium virus JoeDirt, Mycobacterium virus Rumpelstiltskin, Streptococcus virus 858, Streptococcus virus 2972, Streptococcus virus ALQ132, Streptococcus virus 01205, Streptococcus virus Sfi11, Pseudomonas virus D3112, Pseudomonas virus DMS3, Pseudomonas virus FHA0480, Pseudomonas virus LPB1, Pseudomonas virus MP22, Pseudomonas virus MP29, Pseudomonas virus MP38, Pseudomonas virus PA1KOR, Cellulophaga virus ST, Bacillus virus 250, Bacillus virus IEBH, Lactococcus virus bIL67, Lactococcus virus c2, Corynebacterium virus C3PO, Corynebacterium virus Darwin, Corynebacterium virus Zion, Lactobacillus virus c5, Lactobacillus virus Ld3, Lactobacillus virus Ld17, Lactobacillus virus Ld25A, Lactobacillus virus LLKu, Lactobacillus virus phiLdb, Mycobacterium virus Che9c, Mycobacterium virus Sbash, Mycobacterium virus Ardmore, Mycobacterium virus Avani, Mycobacterium virus Boomer, Mycobacterium virus Che8, Mycobacterium virus Che9d, Mycobacterium virus DeadP, Mycobacterium virus Dlane, Mycobacterium virus Dorothy, Mycobacterium virus DotProduct, Mycobacterium virus Drago, Mycobacterium virus Fruitloop, Mycobacterium virus GUmbie, Mycobacterium virus Ibhubesi, Mycobacterium virus Llij, Mycobacterium virus Mozy, Mycobacterium virus Mutaforma13, Mycobacterium virus Pacc40, Mycobacterium virus PMC, Mycobacterium virus Ramsey, Mycobacterium virus RockyHorror, Mycobacterium virus SG4, Mycobacterium virus Shauna1, Mycobacterium virus Shilan, Mycobacterium virus Spartacus, Mycobacterium virus Taj, Mycobacterium virus Tweety, Mycobacterium virus Wee, Mycobacterium virus Yoshi, Salmonella virus Chi, Salmonella virus FSLSP030, Salmonella virus FSLSP088, Salmonella virus iEPS5, Salmonella virus SPN19, Corynebacterium virus P1201, Clavibacter virus CMP1, Clavibacter virus CN1A, Lactobacillus virus ATCC8014, Lactobacillus virus phiJL1, Pediococcus virus cIP1, Arthrobacter virus Coral, Arthrobacter virus Kepler, Mycobacterium virus Corndog, Mycobacterium virus Firecracker, Rhodobacter virus RcCronus, Gordonia virus DareDevil, Arthrobacter virus Decurro, Stenotrophomonas virus DLP5, Gordonia virus Demosthenes, Gordonia virus Katyusha, Gordonia virus Kvothe, Pseudomonas virus D3, Pseudomonas virus PMG1, Escherichia virus EK99P1, Escherichia virus HK578, Escherichia virus JL1, Escherichia virus SSL2009a, Escherichia virus YD2008s, Shigella virus EP23, Sodalis virus S01, Microbacterium virus Dismas, Propionibacterium virus B22, Propionibacterium virus Doucette, Propionibacterium virus E6, Propionibacterium virus G4, Microbacterium virus Eden, Enterococcus virus AL2, Enterococcus virus AL3, Enterococcus virus AUEF3, Enterococcus virus EcZZ2, Enterococcus virus EF3, Enterococcus virus EF4, Enterococcus virus EfaCPT1, Enterococcus virus IME196, Enterococcus virus LY0322, Enterococcus virus phiSHEF2, Enterococcus virus phiSHEF4, Enterococcus virus phiSHEF5, Enterococcus virus PMBT2, Enterococcus virus SANTOR1, Edwardsiella virus eiAU, Xanthomonas virus PhiL7, Microbacterium virus Eleri, Gordonia virus Cozz, Gordonia virus Emalyn, Gordonia virus GTE2, Gordonia virus Troje, Gordonia virus Eyre, Gordonia virus Fairfaxidumvirus, Microbacterium virus ISF9, Erwinia virus Eho49, Erwinia virus Eho59, Staphylococcus virus 2638A, Staphylococcus virus QT1, Colwellia virus 9A, Mycobacterium virus Alma, Mycobacterium virus Arturo, Mycobacterium virus Astro, Mycobacterium virus Backyardigan, Mycobacterium virus Benedict, Mycobacterium virus Bethlehem, Mycobacterium virus Billknuckles, Mycobacterium virus BPBiebs31, Mycobacterium virus Bruns, Mycobacterium virus Bxb 1, Mycobacterium virus Bxz2, Mycobacterium virus Che12, Mycobacterium virus Cuco, Mycobacterium virus D29, Mycobacterium virus Doom, Mycobacterium virus Ericb, Mycobacterium virus Euphoria, Mycobacterium virus George, Mycobacterium virus Gladiator, Mycobacterium virus Goose, Mycobacterium virus Hammer, Mycobacterium virus Heldan, Mycobacterium virus Jasper, Mycobacterium virus JC27, Mycobacterium virus Jeffabunny, Mycobacterium virus JHC117, Mycobacterium virus KBG, Mycobacterium virus Kssjeb, Mycobacterium virus Kugel, Mycobacterium virus L5, Mycobacterium virus Lesedi, Mycobacterium virus LHTSCC, Mycobacterium virus lockley, Mycobacterium virus Marcell, Mycobacterium virus Microwolf, Mycobacterium virus Mrgordo, Mycobacterium virus Museum, Mycobacterium virus Nepal, Mycobacterium virus Packman, Mycobacterium virus Peaches, Mycobacterium virus Perseus, Mycobacterium virus Pukovnik, Mycobacterium virus Rebeuca, Mycobacterium virus Redrock, Mycobacterium virus Ridgecb, Mycobacterium virus Rockstar, Mycobacterium virus Saintus, Mycobacterium virus Skipole, Mycobacterium virus Solon, Mycobacterium virus Switzer, Mycobacterium virus SWU1, Mycobacterium virus Tiger, Mycobacterium virus Timshel, Mycobacterium virus Trixie, Mycobacterium virus Turbido, Mycobacterium virus Twister, Mycobacterium virus U2, Mycobacterium virus Violet, Mycobacterium virus Wonder, Mycobacterium virus Gaia, Arthrobacter virus Abidatro, Arthrobacter virus Galaxy, Gordonia virus GAL1, Gordonia virus GMA3, Gordonia virus Gsput1, Gordonia virus GMAT, Gordonia virus GTE7, Gordonia virus Ghobes, Mycobacterium virus Giles, Microbacterium virus OneinaGillian, Gordonia virus GodonK, Microbacterium virus Goodman, Arthrobacter virus Captnmurica, Arthrobacter virus Gordon, Gordonia virus GordTnk2, Proteus virus Isfahan, Gordonia virus Jumbo, Gordonia virus Gustav, Gordonia virus Mandia, Paenibacillus virus Harrison, Gordonia virus Hedwig, Cellulophaga virus Cba121, Cellulophaga virus Cba171, Cellulophaga virus Cba181, Escherichia virus HK022, Escherichia virus HK75, Escherichia virus HK97, Escherichia virus HK106, Escherichia virus HK446, Escherichia virus HK542, Escherichia virus HK544, Escherichia virus HK633, Escherichia virus mEp234, Escherichia virus mEpX1, Escherichia virus mEpX2, Streptomyces virus Hiyaa, Salinibacter virus M1EM1, Salinibacter virus M8CR30-2, Listeria virus LP26, Listeria virus LP37, Listeria virus LP110, Listeria virus LP114, Listeria virus P70, Corynebacterium virus phi673, Corynebacterium virus phi674, Microbacterium virus Hamlet, Microbacterium virus Ilzat, Polaribacter virus P12002L, Polaribacter virus P12002S, Nonlabens virus P12024L, Nonlabens virus P12024S, Gordonia virus Jace, Brevibacillus virus Jenst, Corynebacterium virus Juicebox, Salinibacter virus M31CR41-2, Salinibacter virus SRUTV1, Arthrobacter virus Kellezzio, Arthrobacter virus Kitkat, Burkholderia virus KL1, Xanthomonas virus CP1, Microbacterium virus Golden, Microbacterium virus Koji, Arthrobacter virus Bennie, Arthrobacter virus DrRobert, Arthrobacter virus Glenn, Arthrobacter virus HunterDalle, Arthrobacter virus Joann, Arthrobacter virus Korra, Arthrobacter virus Preamble, Arthrobacter virus Pumancara, Arthrobacter virus Wayne, Mycobacterium virus 244, Mycobacterium virus Bask21, Mycobacterium virus CJW1, Mycobacterium virus Eureka, Mycobacterium virus Kostya, Mycobacterium virus Porky, Mycobacterium virus Pumpkin, Mycobacterium virus Sirduracell, Mycobacterium virus Toto, Microbacterium virus Krampus, Salinibacter virus M8CC19, Salinibacter virus M8CRM1, Sphingobium virus Lacusarx, Escherichia virus DE3, Escherichia virus HK629, Escherichia virus HK630, Escherichia virus Lambda, Pseudomonas virus Lana, Arthrobacter virus Laroye, Eggerthella virus PMBT5, Arthobacter virus Liebe, Mycobacterium virus Halo, Mycobacterium virus Liefie, Acinetobacter virus IMEAB3, Acinetobacter virus Loki, Streptomyces virus phiBT1, Streptomyces virus phiC31, Brevibacterium virus LuckyBarnes, Gordonia virus Lucky10, Faecalibacterium virus Lugh, Bacillus virus BMBtp2, Bacillus virus TP21, Bacillus virus Mgbh1, Arthrobacter virus Maj a, Arthrobacter virus DrManhattan, Mycobacterium virus Ff47, Mycobacterium virus Muddy, Vibrio virus MAR10, Vibrio virus SSP002, Mycobacterium virus Marvin, Mycobacterium virus Mosmoris, Pseudomonas virus PMBT3, Microbacterium virus MementoMori, Microbacterium virus Fireman, Microbacterium virus Metamorphoo, Microbacterium virus RobsFeet, Microbacterium virus Min1, Streptococcus virus 7201, Streptococcus virus DT1, Streptococcus virus phiAbc2, Streptococcus virus Sfi19, Streptococcus virus Sfi21, Gordinia virus Birksandsocks, Gordonia virus Flakey, Gordonia virus Monty, Gordonia virus Stevefrench, Arthrobacter virus Circum, Arthrobacter virus Mudcat, Escherichia virus EC2, Salmonella virus Lumpael, Dinoroseobacter virus DSC, Burkholderia virus BcepNazgul, Microbacterium virus Neferthena, Pseudomonas virus nickie, Pseudomonas virus NP1, Pseudomonas virus PaMx25, Escherichia virus 9g, Escherichia virus JenK1, Escherichia virus JenP1, Escherichia virus JenP2, Salmonella virus SE1Kor, Salmonella virus 9NA, Salmonella virus SP069, Gordonia virus Nyceirae, Faecalibacterium virus Oengus, Mycobacterium virus Baka, Mycobacterium virus Courthouse, Mycobacterium virus Littlee, Mycobacterium virus Omega, Mycobacterium virus Optimus, Mycobacterium virus Thibault, Gordonia virus BrutonGaster, Gordonia virus OneUp, Gordonia virus Orchid, Thermus virus P23-45, Thermus virus P74-26, Propionibacterium virus ATCC29399BC, Propionibacterium virus ATCC29399BT, Propionibacterium virus Attacne, Propionibacterium virus Keiki, Propionibacterium virus Kubed, Propionibacterium virus Lauchelly, Propionibacterium virus MrAK, Propionibacterium virus Ouroboros, Propionibacterium virus P91, Propionibacterium virus P105, Propionibacterium virus P144, Propionibacterium virus P1001, Propionibacterium virus P1.1, Propionibacterium virus P100A, Propionibacterium virus P100D, Propionibacterium virus P101A, Propionibacterium virus P104A, Propionibacterium virus PA6, Propionibacterium virus Pacnes201215, Propionibacterium virus PAD20, Propionibacterium virus PAS50, Propionibacterium virus PHL009M11, Propionibacterium virus PHL025M00, Propionibacterium virus PHL037M02, Propionibacterium virus PHL041M10, Propionibacterium virus PHL060L00, Propionibacterium virus PHL067M01, Propionibacterium virus PHL070N00, Propionibacterium virus PHL071N05, Propionibacterium virus PHL082M03, Propionibacterium virus PHL092M00, Propionibacterium virus PHL095N00, Propionibacterium virus PHL111M01, Propionibacterium virus PHL112N00, Propionibacterium virus PHL113M01, Propionibacterium virus PHL114L00, Propionibacterium virus PHL116M00, Propionibacterium virus PHL117M00, Propionibacterium virus PHL117M01, Propionibacterium virus PHL132N00, Propionibacterium virus PHL141N00, Propionibacterium virus PHL151M00, Propionibacterium virus PHL151N00, Propionibacterium virus PHL152M00, Propionibacterium virus PHL163M00, Propionibacterium virus PHL171M01, Propionibacterium virus PHL179M00, Propionibacterium virus PHL194M00, Propionibacterium virus PHL199M00, Propionibacterium virus PHL301M00, Propionibacterium virus PHL308M00, Propionibacterium virus Pirate, Propionibacterium virus Procrass1, Propionibacterium virus SKKY, Propionibacterium virus Solid, Propionibacterium virus Stormborn, Propionibacterium virus Wizzo, Pseudomonas virus PaMx28, Pseudomonas virus PaMx74, Mycobacterium virus Papyrus, Mycobacterium virus Send513, Mycobacterium virus Patience, Mycobacterium virus PBI1, Rhodococcus virus Pepy6, Rhodococcus virus Poco6, Staphylococcus virus 11, Staphylococcus virus 29, Staphylococcus virus 37, Staphylococcus virus 53, Staphylococcus virus 55, Staphylococcus virus 69, Staphylococcus virus 71, Staphylococcus virus 80, Staphylococcus virus 85, Staphylococcus virus 88, Staphylococcus virus 92, Staphylococcus virus 96, Staphylococcus virus 187, Staphylococcus virus 52a, Staphylococcus virus 80alpha, Staphylococcus virus CNPH82, Staphylococcus virus EW, Staphylococcus virus IPLA5, Staphylococcus virus IPLA7, Staphylococcus virus IPLA88, Staphylococcus virus PH15, Staphylococcus virus phiETA, Staphylococcus virus phiETA2, Staphylococcus virus phiETA3, Staphylococcus virus phiMR11, Staphylococcus virus phiMR25, Staphylococcus virus phiNM1, Staphylococcus virus phiNM2, Staphylococcus virus phiNM4, Staphylococcus virus SAP26, Staphylococcus virus X2, Enterococcus virus FL1, Enterococcus virus FL2, Enterococcus virus FL3, Streptomyces virus Picard, Microbacterium virus Pikmin, Corynebacterium virus Poushou, Providencia virus PR1, Listeria virus LP302, Listeria virus PSA, Psimunavirus psiM2, Propionibacterium virus PFR1, Microbacterium phage KaiHaiDragon, Microbacterium phage Paschalis, Microbacterium phage Quhwah, Streptomyces virus Darolandstone, Streptomyces virus Raleigh, Escherichia virus N15, Rhodococcus virus RER2, Rhizobium virus P106B, Strepomyces virus Drgrey, Strepomyces virus Rima, Microbacterium virus Hendrix, Gordonia virus Fryberger, Gordonia virus Ronaldo, Aeromonas virus pIS4A, Streptomyces virus Rowa, Gordonia virus Ruthy, Streptomyces virus Jay2Jay, Streptomyces virus Mildred21, Streptomyces virus NootNoot, Streptomyces virus Paradiddles, Streptomyces virus Peebs, Streptomyces virus Samisti12, Pseudomonas virus SM1, Corynebacterium virus SamW, Xylella virus Salvo, Xylella virus Sano, Caulobacter virus Sansa, Enterococcus virus BC611, Enterococcus virus IMEEF1, Enterococcus virus SAP6, Enterococcus virus VD13, Streptococcus virus SPQS1, Salmonella virus Sasha, Corynebacterium virus BFK20, Geobacillus virus Tp84, Streptomyces virus Scap1, Gordonia virus Schnabeltier, Microbacterium virus Schubert, Pseudomonas virus 73, Pseudomonas virus Ab26, Pseudomonas virus Kakheti25, Escherichia virus Cajan, Escherichia virus Seurat, Caulobacter virus Seuss, Staphylococcus virus SEP9, Staphylococcus virus Sextaec, Paenibacillus virus Diva, Paenibacillus virus Hb10c2, Paenibacillus virus Rani, Paenibacillus virus Shelly, Paenibacillus virus Sitara, Paenibacillus virus Willow, Lactococcus virus 712, Lactococcus virus ASCC191, Lactococcus virus ASCC273, Lactococcus virus ASCC281, Lactococcus virus ASCC465, Lactococcus virus ASCC532, Lactococcus virus Bibb29, Lactococcus virus bIL170, Lactococcus virus CB13, Lactococcus virus CB14, Lactococcus virus CB19, Lactococcus virus CB20, Lactococcus virus jj50, Lactococcus virus P2, Lactococcus virus P008, Lactococcus virus sk1, Lactococcus virus S14, Bacillus virus Slash, Bacillus virus Stahl, Bacillus virus Staley, Bacillus virus Stills, Gordonia virus Bachita, Gordonia virus ClubL, Gordonia virus Smoothie, Arthobacter virus Sonali, Gordonia virus Soups, Gordonia virus Strosahl, Gordonia virus Wait, Gordonia virus Sour, Bacillus virus SPbeta, Microbacterium virus Hyperion, Microbacterium virus Squash, Burkholderia virus phi6442, Burkholderia virus phi1026b, Burkholderia virus phiE125, Achromobacter virus 83-24, Achromobacter virus JWX, Arthrobacter virus Tank, Gordonia virus Suzy, Gordonia virus Terapin, Streptomyces virus TG1, Mycobacterium virus Anaya, Mycobacterium virus Angelica, Mycobacterium virus CrimD, Mycobacterium virus Fionnbharth, Mycobacterium virus JAWS, Mycobacterium virus Larva, Mycobacterium virus MacnCheese, Mycobacterium virus Pixie, Mycobacterium virus TM4, Tsukamurella virus TIN2, Tsukamurella virus TIN3, Tsukamurella virus TIN4, Rhodobacter virus RcSpartan, Rhodobacter virus RcTitan, Mycobacterium virus Tortellini, Staphylococcus virus 47, Staphylococcus virus 3a, Staphylococcus virus 42e, Staphylococcus virus IPLA35, Staphylococcus virus phi12, Staphylococcus virus phiSLT, Mycobacterium virus 32HC, Rhodococcus virus Trina, Gordonia virus Trine, Paenibacillus virus Tripp, Flavobacterium virus 1H, Flavobacterium virus 23T, Flavobacterium virus 2A, Flavobacterium virus 6H, Streptomyces virus Lilbooboo, Streptomyces virus Vash, Paenibacillus virus Vegas, Gordonia virus Vendetta, Paracoccus virus Shpa, Pantoea virus Vid5, Acinetobacter virus B1251, Acinetobacter virus R3177, Gordonia virus Brandonk123, Gordonia virus Lennon, Gordonia virus Vivi2, Bordetella virus CN1, Bordetella virus CN2, Bordetella virus FP1, Bordetella virus MW2, Bacillus virus Wbeta, Rhodococcus virus Weasel, Mycobacterium virus Wildcat, Gordonia virus Billnye, Gordonia virus Twister6, Gordonia virus Wizard, Gordonia virus Hotorobo, Gordonia virus Woes, Streptomyces virus TP1604, Streptomyces virus YDN12, Roseobacter virus RDJL1, Roseobacter virus RDJL2, Xanthomonas virus OP1, Xanthomonas virus Xop411, Xanthomonas virus Xp10, Arthobacter virus Yang, Alphaproteobacteria virus phiJl001, Pseudomonas virus LKO4, Pseudomonas virus M6, Pseudomonas virus MP1412, Pseudomonas virus PAE1, Pseudomonas virus Yua, Gordonia virus Yvonnetastic, Microbacterium virus Zeta1847, Rhodococcus virus RGL3, Paenibacillus virus Lily, Vibrio virus CTXphi, Propionibacterium virus B5, Vibrio virus KSF1, Xanthomonas virus Cf1c, Vibrio virus fs1, Vibrio virus VGJ, Ralstonia virus RS551, Ralstonia virus RS603, Ralstonia virus RSM1, Ralstonia virus RSM3, Escherichia virus If1, Escherichia virus M13, Escherichia virus 122, Salmonella virus IKe, Ralstonia virus PE226, Pseudomonas virus Pf1, Stenotrophomonas virus PSH1, Ralstonia virus RSS1, Vibrio virus fs2, Vibrio virus VFJ, Stenotrophomonas virus SMA6, Stenotrophomonas virus SMA5, Stenotrophomonas virus SMA7, Pseudomonas virus Pf3, Thermus virus OH3, Vibrio virus VfO3K6, Vibrio virus VCY, Vibrio virus Vf33, Xanthomonas virus Xf109, Acholeplasma virus L51, Spiroplasma virus SVTS2, Spiroplasma virus C74, Spiroplasma virus R8A2B, Spiroplasma virus SkV1CR23x, Escherichia virus alpha3, Escherichia virus ID21, Escherichia virus ID32, Escherichia virus ID62, Escherichia virus NC28, Escherichia virus NC29, Escherichia virus NC35, Escherichia virus phiK, Escherichia virus St1, Escherichia virus WA45, Escherichia virus G4, Escherichia virus ID52, Escherichia virus Talmos, Escherichia virus phiX174, Bdellovibrio virus MAC1, Bdellovibrio virus MH2K, Chlamydia virus Chp1, Chlamydia virus Chp2, Chlamydia virus CPAR39, Chlamydia virus CPG1, Spiroplasma virus SpV4, Bombyx mori bidensovirus, Acerodon celebensis polyomavirus 1, Artibeus planirostris polyomavirus 2, Artibeus planirostris polyomavirus 3, Ateles paniscus polyomavirus 1, Cardioderma cor polyomavirus 1, Carollia perspicillata polyomavirus 1, Chlorocebus pygerythrus polyomavirus 1, Chlorocebus pygerythrus polyomavirus 3, Dobsonia moluccensis polyomavirus 1, Eidolon helvum polyomavirus 1, Gorilla gorilla polyomavirus 1, Human polyomavirus 5, Human polyomavirus 8, Human polyomavirus 9, Human polyomavirus 13, Human polyomavirus 14, Macaca fascicularis polyomavirus 1, Mesocricetus auratus polyomavirus 1, Miniopterus schreibersii polyomavirus 1, Miniopterus schreibersii polyomavirus 2, Molossus molossus polyomavirus 1, Mus musculus polyomavirus 1, Otomops martiensseni polyomavirus 1, Otomops martiensseni polyomavirus 2, Pan troglodytes polyomavirus 1, Pan troglodytes polyomavirus 2, Pan troglodytes polyomavirus 3, Pan troglodytes polyomavirus 4, Pan troglodytes polyomavirus 5, Pan troglodytes polyomavirus 6, Pan troglodytes polyomavirus 7, Papio cynocephalus polyomavirus 1, Piliocolobus badius polyomavirus 1, Piliocolobus rufomitratus polyomavirus 1, Pongo abelii polyomavirus 1, Pongo pygmaeus polyomavirus 1, Procyon lotor polyomavirus 1, Pteropus vampyrus polyomavirus 1, Rattus norvegicus polyomavirus 1, Sorex araneus polyomavirus 1, Sorex coronatus polyomavirus 1, Sorex minutus polyomavirus 1, Sturnira lilium polyomavirus 1, Tupaia belangeri polyomavirus 1, Acerodon celebensis polyomavirus 2, Artibeus planirostris polyomavirus 1, Canis familiaris polyomavirus 1, Cebus albifrons polyomavirus 1, Cercopithecus erythrotis polyomavirus 1, Chlorocebus pygerythrus polyomavirus 2, Desmodus rotundus polyomavirus 1, Dobsonia moluccensis polyomavirus 2, Dobsonia moluccensis polyomavirus 3, Enhydra lutris polyomavirus 1, Equus caballus polyomavirus 1, Human polyomavirus 1, Human polyomavirus 2, Human polyomavirus 3, Human polyomavirus 4, Leptonychotes weddellii polyomavirus 1, Loxodonta africana polyomavirus 1, Macaca mulatta polyomavirus 1, Mastomys natalensis polyomavirus 1, Meles meles polyomavirus 1, Microtus arvalis polyomavirus 1, Miniopterus africanus polyomavirus 1, Mus musculus polyomavirus 2, Mus musculus polyomavirus 3, Myodes glareolus polyomavirus 1, Myotis lucifugus polyomavirus 1, Pan troglodytes polyomavirus 8, Papio cynocephalus polyomavirus 2, Pteronotus davyi polyomavirus 1, Pteronotus parnellii polyomavirus 1, Rattus norvegicus polyomavirus 2, Rousettus aegyptiacus polyomavirus 1, Saimiri boliviensis polyomavirus 1, Saimiri sciureus polyomavirus 1, Vicugna pacos polyomavirus 1, Zalophus californianus polyomavirus 1, Human polyomavirus 6, Human polyomavirus 7, Human polyomavirus 10, Human polyomavirus 11, Anser anser polyomavirus 1, Ayes polyomavirus 1, Corvus monedula polyomavirus 1, Cracticus torquatus polyomavirus 1, Erythrura gouldiae polyomavirus 1, Lonchura maja polyomavirus 1, Pygoscelis adeliae polyomavirus 1, Pyrrhula pyrrhula polyomavirus 1, Serinus canaria polyomavirus 1, Ailuropoda melanoleuca polyomavirus 1, Bos taurus polyomavirus 1, Centropristis striata polyomavirus 1, Delphinus delphis polyomavirus 1, Procyon lotor polyomavirus 2, Rhynchobatus djiddensis polyomavirus 1, Sparus aurata polyomavirus 1, Trematomus bernacchii polyomavirus 1, Trematomus pennellii polyomavirus 1, Alphapapillomavirus 1, Alphapapillomavirus 2, Alphapapillomavirus 3, Alphapapillomavirus 4, Alphapapillomavirus 5, Alphapapillomavirus 6, Alphapapillomavirus 7, Alphapapillomavirus 8, Alphapapillomavirus 9, Alphapapillomavirus 10, Alphapapillomavirus 11, Alphapapillomavirus 12, Alphapapillomavirus 13, Alphapapillomavirus 14, Betapapillomavirus 1, Betapapillomavirus 2, Betapapillomavirus 3, Betapapillomavirus 4, Betapapillomavirus 5, Betapapillomavirus 6, Chipapillomavirus 1, Chipapillomavirus 2, Chipapillomavirus 3, Deltapapillomavirus 1, Deltapapillomavirus 2, Deltapapillomavirus 3, Deltapapillomavirus 4, Deltapapillomavirus 5, Deltapapillomavirus 6, Deltapapillomavirus 7, Dyochipapillomavirus 1, Dyodeltapapillomavirus 1, Dyoepsilonpapillomavirus 1, Dyoetapapillomavirus 1, Dyoiotapapillomavirus 1, Dyoiotapapillomavirus 2, Dyokappapapillomavirus 1, Dyokappapapillomavirus 2, Dyokappapapillomavirus 3, Dyokappapapillomavirus 4, Dyokappapapillomavirus 5, Dyolambdapapillomavirus 1, Dyomupapillomavirus 1, Dyonupapillomavirus 1, Dyoomegapapillomavirus 1, Dyoomikronpapillomavirus 1, Dyophipapillomavirus 1, Dyopipapillomavirus 1, Dyopsipapillomavirus 1, Dyorhopapillomavirus 1, Dyosigmapapillomavirus 1, Dyotaupapillomavirus 1, Dyothetapapillomavirus 1, Dyoupsilonpapillomavirus 1, Dyoxipapillomavirus 1, Dyoxipapillomavirus 2, Dyozetapapillomavirus 1, Epsilonpapillomavirus 1, Epsilonpapillomavirus 2, Etapapillomavirus 1, Gammapapillomavirus 1, Gammapapillomavirus 2, Gammapapillomavirus 3, Gammapapillomavirus 4, Gammapapillomavirus 5, Gammapapillomavirus 6, Gammapapillomavirus 7, Gammapapillomavirus 8, Gammapapillomavirus 9, Gammapapillomavirus 10, Gammapapillomavirus 11, Gammapapillomavirus 12, Gammapapillomavirus 13, Gammapapillomavirus 14, Gammapapillomavirus 15, Gammapapillomavirus 16, Gammapapillomavirus 17, Gammapapillomavirus 18, Gammapapillomavirus 19, Gammapapillomavirus 20, Gammapapillomavirus 21, Gammapapillomavirus 22, Gammapapillomavirus 23, Gammapapillomavirus 24, Gammapapillomavirus 25, Gammapapillomavirus 26, Gammapapillomavirus 27, Iotapapillomavirus 1, Iotapapillomavirus 2, Kappapapillomavirus 1, Kappapapillomavirus 2, Lambdapapillomavirus 1, Lambdapapillomavirus 2, Lambdapapillomavirus 3, Lambdapapillomavirus 4, Lambdapapillomavirus 5, Mupapillomavirus 1, Mupapillomavirus 2, Mupapillomavirus 3, Nupapillomavirus 1, Omegapapillomavirus 1, Omikronpapillomavirus 1, Phipapillomavirus 1, Pipapillomavirus 1, Pipapillomavirus 2, Psipapillomavirus 1, Psipapillomavirus 2, Psipapillomavirus 3, Rhopapillomavirus 1, Rhopapillomavirus 2, Sigmapapillomavirus 1, Taupapillomavirus 1, Taupapillomavirus 2, Taupapillomavirus 3, Taupapillomavirus 4, Thetapapillomavirus 1, Treisdeltapapillomavirus 1, Treisepsilonpapillomavirus 1, Treisetapapillomavirus 1, Treisiotapapillomavirus 1, Treiskappapapillomavirus 1, Treisthetapapillomavirus 1, Treiszetapapillomavirus 1, Upsilonpapillomavirus 1, Upsilonpapillomavirus 2, Upsilonpapillomavirus 3, Xipapillomavirus 1, Xipapillomavirus 2, Xipapillomavirus 3, Xipapillomavirus 4, Xipapillomavirus 5, Zetapapillomavirus 1, Alefpapillomavirus 1, Asteroid aquambidensovirus 1, Decapod aquambidensovirus 1, Blattodean blattambidensovirus 1, Hemipteran hemiambidensovirus 1, Hemipteran hemiambidensovirus 2, Lepidopteran iteradensovirus 1, Lepidopteran iteradensovirus 2, Lepidopteran iteradensovirus 3, Lepidopteran iteradensovirus 4, Lepidopteran iteradensovirus 5, Orthopteran miniambidensovirus 1, Blattodean pefuambidensovirus 1, Dipteran protoambidensovirus 1, Lepidopteran protoambidensovirus 1, Hemipteran scindoambidensovirus 1, Hymenopteran scindoambidensovirus 1, Orthopteran scindoambidensovirus 1, Dipteran brevihamaparvovirus 1, Dipteran brevihamaparvovirus 2, Carnivore chaphamaparvovirus 1, Chiropteran chaphamaparvovirus 1, Galliform chaphamaparvovirus 1, Galliform chaphamaparvovirus 2, Galliform chaphamaparvovirus 3, Rodent chaphamaparvovirus 1, Rodent chaphamaparvovirus 2, Ungulate chaphamaparvovirus 1, Decapod hepanhamaparvovirus 1, Syngnathid ichthamaparvovirus 1, Decapod penstylhamaparvovirus 1, Carnivore amdoparvovirus 1, Carnivore amdoparvovirus 2, Carnivore amdoparvovirus 3, Carnivore amdoparvovirus 4, Carnivore amdoparvovirus 5, Chiropteran artiparvovirus 1, Galliform aveparvovirus 1, Gruiform aveparvovirus 1, Carnivore bocaparvovirus 1, Carnivore bocaparvovirus 2, Carnivore bocaparvovirus 3, Carnivore bocaparvovirus 4, Carnivore bocaparvovirus 5, Carnivore bocaparvovirus 6, Chiropteran bocaparvovirus 1, Chiropteran bocaparvovirus 2, Chiropteran bocaparvovirus 3, Chiropteran bocaparvovirus 4, Lagomorph bocaparvovirus 1, Pinniped bocaparvovirus 1, Pinniped bocaparvovirus 2, Primate bocaparvovirus 1, Primate bocaparvovirus 2, Rodent bocaparvovirus 1, Rodent bocaparvovirus 2, Ungulate bocaparvovirus 1, Ungulate bocaparvovirus 2, Ungulate bocaparvovirus 3, Ungulate bocaparvovirus 4, Ungulate bocaparvovirus 5, Ungulate bocaparvovirus 6, Ungulate bocaparvovirus 7, Ungulate bocaparvovirus 8, Pinniped copiparvovirus 1, Ungulate copiparvovirus 1, Ungulate copiparvovirus 2, Ungulate copiparvovirus 3, Ungulate copiparvovirus 4, Ungulate copiparvovirus 5, Ungulate copiparvovirus 6, Adeno-associated dependoparvovirus A, Adeno-associated dependoparvovirus B, Anseriform dependoparvovirus 1, Avian dependoparvovirus 1, Chiropteran dependoparvovirus 1, Pinniped dependoparvovirus 1, Rodent dependoparvovirus 1, Rodent dependoparvovirus 2, Squamate dependoparvovirus 1, Squamate dependoparvovirus 2, Pinniped erythroparvovirus 1, Primate erythroparvovirus 1, Primate erythroparvovirus 2, Primate erythroparvovirus 3, Primate erythroparvovirus 4, Rodent erythroparvovirus 1, Ungulate erythroparvovirus 1, Primate loriparvovirus 1, Carnivore protoparvovirus, Carnivore protoparvovirus 1, Chiropteran protoparvovirus 1, Eulipotyphla protoparvovirus 1, Primate protoparvovirus 1, Primate protoparvovirus 2, Primate protoparvovirus 3, Primate protoparvovirus 4, Rodent protoparvovirus 1, Rodent protoparvovirus 2, Rodent protoparvovirus 3, Ungulate protoparvovirus 1, Ungulate protoparvovirus 2, Chiropteran tetraparvovirus 1, Primate tetraparvovirus 1, Ungulate tetraparvovirus 1, Ungulate tetraparvovirus 2, Ungulate tetraparvovirus 3, Ungulate tetraparvovirus 4, Chaetoceros diatodnavirus 1, Avon-Heathcote Estuary associated kieseladnavirus, Chaetoceros protobacilladnavirus 1, Chaetoceros protobacilladnavirus 2, Chaetoceros protobacilladnavirus 3, Chaetoceros protobacilladnavirus 4, Marine protobacilladnavirus 1, Snail associated protobacilladnavirus 1, Snail associated protobacilladnavirus 2, Barbel circovirus, Bat associated circovirus 1, Bat associated circovirus 2, Bat associated circovirus 3, Bat associated circovirus 4, Bat associated circovirus 5, Bat associated circovirus 6, Bat associated circovirus 7, Bat associated circovirus 8, Bat associated circovirus 9, Bat associated circovirus 10, Bat associated circovirus 11, Bat associated circovirus 12, Beak and feather disease virus, Canary circovirus, Canine circovirus, Chimpanzee associated circovirus 1, Civet circovirus, Duck circovirus, European catfish circovirus, Finch circovirus, Goose circovirus, Gull circovirus, Human associated circovirus 1, Mink circovirus, Mosquito associated circovirus 1, Pigeon circovirus, Porcine circovirus 1, Porcine circovirus 2, Porcine circovirus 3, Raven circovirus, Rodent associated circovirus 1, Rodent associated circovirus 2, Rodent associated circovirus 3, Rodent associated circovirus 4, Rodent associated circovirus 5, Rodent associated circovirus 6, Rodent associated circovirus 7, Starling circovirus, Swan circovirus, Tick associated circovirus 1, Tick associated circovirus 2, Zebra finch circovirus, Ant associated cyclovirus 1, Bat associated cyclovirus 1, Bat associated cyclovirus 2, Bat associated cyclovirus 3, Bat associated cyclovirus 4, Bat associated cyclovirus 5, Bat associated cyclovirus 6, Bat associated cyclovirus 7, Bat associated cyclovirus 8, Bat associated cyclovirus 9, Bat associated cyclovirus 10, Bat associated cyclovirus 11, Bat associated cyclovirus 12, Bat associated cyclovirus 13, Bat associated cyclovirus 14, Bat associated cyclovirus 15, Bat associated cyclovirus 16, Bovine associated cyclovirus 1, Chicken associated cyclovirus 1, Chicken associated cyclovirus 2, Chimpanzee associated cyclovirus 1, Cockroach associated cyclovirus 1, Dragonfly associated cyclovirus 1, Dragonfly associated cyclovirus 2, Dragonfly associated cyclovirus 3, Dragonfly associated cyclovirus 4, Dragonfly associated cyclovirus 5, Dragonfly associated cyclovirus 6, Dragonfly associated cyclovirus 7, Dragonfly associated cyclovirus 8, Duck associated cyclovirus 1, Feline associated cyclovirus 1, Goat associated cyclovirus 1, Horse associated cyclovirus 1, Human associated cyclovirus 1, Human associated cyclovirus 2, Human associated cyclovirus 3, Human associated cyclovirus 4, Human associated cyclovirus 5, Human associated cyclovirus 6, Human associated cyclovirus 7, Human associated cyclovirus 8, Human associated cyclovirus 9, Human associated cyclovirus 10, Human associated cyclovirus 11, Human associated cyclovirus 12, Mouse associated cyclovirus 1, Rodent associated cyclovirus 1, Rodent associated cyclovirus 2, Spider associated cyclovirus 1, Squirrel associated cyclovirus 1, Bovine associated bovismacovirus 1, Bovine associated bovismacovirus 2, Dragonfly associated bovismacovirus 1, Bovine associated cosmacovirus 1, Dragonfly associated dragsmacovirus 1, Bovine associated drosmacovirus 1, Camel associated drosmacovirus 1, Camel associated drosmacovirus2, Bovine associated huchismacovirus 1, Bovine associated huchismacovirus 2, Chicken associated huchismacovirus 1, Chicken associated huchismacovirus 2, Human associated huchismacovirus 1, Human associated huchismacovirus 2, Human associated huchismacovirus 3, Bovine associated porprismacovirus 1, Camel associated porprismacovirus 1, Camel associated porprismacovirus 2, Camel associated porprismacovirus 3, Camel associated porprismacovirus 4, Chimpanzee associated porprismacovirus 1, Chimpanzee associated porprismacovirus 2, Gorilla associated porprismacovirus 1, Howler monkey associated porprismacovirus 1, Human associated porprismacovirus 1, Human associated porprismacovirus 2, Lemur associated porprismacovirus 1, Porcine associated porprismacovirus 1, Porcine associated porprismacovirus 2, Porcine associated porprismacovirus 3, Porcine associated porprismacovirus 4, Porcine associated porprismacovirus 5, Porcine associated porprismacovirus 6, Porcine associated porprismacovirus 7, Porcine associated porprismacovirus 8, Porcine associated porprismacovirus 9, Porcine associated porprismacovirus 10, Rat associated porprismacovirus 1, Sheep associated porprismacovirus 1, Sheep associated porprismacovirus 2, Sheep associated porprismacovirus 3, Turkey associated porprismacovirus 1, Abaca bunchy top virus, Banana bunchy top virus, Cardamom bushy dwarf virus, Black medic leaf roll virus, Faba bean necrotic stunt virus, Faba bean necrotic yellows virus, Faba bean yellow leaf virus, Milk vetch dwarf virus, Pea necrotic yellow dwarf virus, Pea yellow stunt virus, Subterranean clover stunt virus, Coconut foliar decay virus, Brisavirus, Vientovirus, Beet curly top Iran virus, Exomis microphylla latent virus, Spinach curly top Arizona virus, Abutilon golden mosaic virus, Abutilon mosaic Bolivia virus, Abutilon mosaic Brazil virus, Abutilon mosaic virus, African cassava mosaic Burkina Faso virus, African cassava mosaic virus, Ageratum enation virus, Ageratum leaf curl Sichuan virus, Ageratum leaf curl virus, Ageratum yellow vein Hualian virus, Ageratum yellow vein Sri Lanka virus, Ageratum yellow vein virus, Allamanda leaf curl virus, Allamanda leaf mottle distortion virus, Alternanthera yellow vein virus, Andrographis yellow vein leaf curl virus, Asystasia mosaic Madagascar virus, Bean calico mosaic virus, Bean chlorosis virus, Bean dwarf mosaic virus, Bean golden mosaic virus, Bean golden yellow mosaic virus, Bean leaf crumple virus, Bean white chlorosis mosaic virus, Bean yellow mosaic Mexico virus, Bhendi yellow vein Bhubhaneswar virus, Bhendi yellow vein Haryana virus, Bhendi yellow vein mosaic Delhi virus, Bhendi yellow vein mosaic virus, Bitter gourd yellow mosaic virus, Blainvillea yellow spot virus, Blechum interveinal chlorosis virus, Blechum yellow vein virus, Boerhavia yellow spot virus, Cabbage leaf curl Jamaica virus, Cabbage leaf curl virus, Capraria yellow spot virus, Cassava mosaic Madagascar virus, Catharanthus yellow mosaic virus, Centrosema yellow spot virus, Chayote yellow mosaic virus, Chenopodium leaf curl virus, Chilli leaf curl Ahmedabad virus, Chilli leaf curl Bhavanisagar virus, Chilli leaf curl Gonda virus, Chilli leaf curl India virus, Chilli leaf curl Kanpur virus, Chilli leaf curl Sri Lanka virus, Chilli leaf curl Vellanad virus, Chilli leaf curl virus, Chino del tomate Amazonas virus, Chino del tomate virus, Cleome golden mosaic virus, Cleome leaf crumple virus, Clerodendron golden mosaic virus, Clerodendron yellow mosaic virus, Clerodendrum golden mosaic China virus, Clerodendrum golden mosaic Jiangsu virus, Cnidoscolus mosaic leaf deformation virus, Coccinia mosaic Tamil Nadu virus, Common bean mottle virus, Common bean severe mosaic virus, Corchorus golden mosaic virus, Corchorus yellow spot virus, Corchorus yellow vein mosaic virus, Corchorus yellow vein virus, Cotton chlorotic spot virus, Cotton leaf crumple virus, Cotton leaf curl Alabad virus, Cotton leaf curl Bangalore virus, Cotton leaf curl Barasat virus, Cotton leaf curl Gezira virus, Cotton leaf curl Kokhran virus, Cotton leaf curl Multan virus, Cotton yellow mosaic virus, Cowpea bright yellow mosaic virus, Cowpea golden mosaic virus, Crassocephalum yellow vein virus, Croton golden mosaic virus, Croton yellow vein mosaic virus, Cucurbit leaf crumple virus, Dalechampia chlorotic mosaic virus, Datura leaf curl virus, Datura leaf distortion virus, Deinbollia mosaic virus, Desmodium leaf distortion virus, Desmodium mottle virus, Dicliptera yellow mottle Cuba virus, Dicliptera yellow mottle virus, Dolichos yellow mosaic virus, Duranta leaf curl virus, East African cassava mosaic Cameroon virus, East African cassava mosaic Kenya virus, East African cassava mosaic Malawi virus, East African cassava mosaic virus, East African cassava mosaic Zanzibar virus, Eclipta yellow vein virus, Emilia yellow vein Fujian virus, Emilia yellow vein Thailand virus, Emilia yellow vein virus, Erectites yellow mosaic virus, Eupatorium yellow vein mosaic virus, Eupatorium yellow vein virus, Euphorbia leaf curl Guangxi virus, Euphorbia leaf curl virus, Euphorbia mosaic Peru virus, Euphorbia mosaic virus, Euphorbia yellow leaf curl virus, Euphorbia yellow mosaic virus, French bean leaf curl virus, Hedyotis uncinella yellow mosaic virus, Hemidesmus yellow mosaic virus, Hibiscus golden mosaic virus, Hollyhock leaf curl virus, Hollyhock yellow vein mosaic virus, Hollyhock yellow vein virus, Honeysuckle yellow vein virus, Horsegram yellow mosaic virus, Indian cassava mosaic virus, Jacquemontia mosaic Yucatan virus, Jacquemontia yellow mosaic virus, Jacquemontia yellow vein virus, Jatropha leaf curl Gujarat virus, Jatropha leaf curl virus, Jatropha leaf yellow mosaic virus, Jatropha mosaic India virus, Jatropha mosaic Nigeria virus, Jatropha mosaic virus, Jatropha yellow mosaic virus, Kudzu mosaic virus, Leonurus mosaic virus, Lindernia anagallis yellow vein virus, Lisianthus enation leaf curl virus, Ludwigia yellow vein Vietnam virus, Ludwigia yellow vein virus, Luffa yellow mosaic virus, Lycianthes yellow mosaic virus, Macroptilium bright mosaic virus, Macroptilium common mosaic virus, Macroptilium golden mosaic virus, Macroptilium mosaic Puerto Rico virus, Macroptilium yellow mosaic Florida virus, Macroptilium yellow mosaic virus, Macroptilium yellow spot virus, Macroptilium yellow vein virus, Malvastrum bright yellow mosaic virus, Malvastrum leaf curl Philippines virus, Malvastrum leaf curl virus, Malvastrum yellow mosaic Helshire virus, Malvastrum yellow mosaic Jamaica virus, Malvastrum yellow mosaic virus, Malvastrum yellow vein Cambodia virus, Malvastrum yellow vein Honghe virus, Malvastrum yellow vein Lahore virus, Malvastrum yellow vein virus, Malvastrum yellow vein Yunnan virus, Melochia mosaic virus, Melochia yellow mosaic virus, Melon chlorotic leaf curl virus, Melon chlorotic mosaic virus, Melon yellow mosaic virus, Merremia mosaic Puerto Rico virus, Merremia mosaic virus, Mesta yellow vein mosaic Bahraich virus, Mimosa yellow leaf curl virus, Mirabilis leaf curl virus, Mungbean yellow mosaic India virus, Mungbean yellow mosaic virus, Okra enation leaf curl virus, Okra leaf curl Oman virus, Okra mottle virus, Okra yellow crinkle virus, Okra yellow mosaic Mexico virus, Oxalis yellow vein virus, Papaya leaf crumple virus, Papaya leaf curl China virus, Papaya leaf curl Guandong virus, Papaya leaf curl virus, Passionfruit leaf curl virus, Passionfruit leaf distortion virus, Passionfruit severe leaf distortion virus, Pavonia mosaic virus, Pavonia yellow mosaic virus, Pea leaf distortion virus, Pedilanthus leaf curl virus, Pepper golden mosaic virus, Pepper huasteco yellow vein virus, Pepper leaf curl Bangladesh virus, Pepper leaf curl Lahore virus, Pepper leaf curl virus, Pepper leaf curl Yunnan virus, Pepper leafroll virus, Pepper yellow leaf curl Aceh virus, Pepper yellow leaf curl Indonesia virus, Pepper yellow leaf curl Indonesia virus 2, Pepper yellow leaf curl Thailand virus, Pepper yellow leaf curl virus, Pepper yellow vein Mali virus, Potato yellow mosaic Panama virus, Potato yellow mosaic virus, Pouzolzia golden mosaic virus, Pouzolzia mosaic Guangdong virus, Pouzolzia yellow mosaic virus, Premna leaf curl virus, Pumpkin yellow mosaic virus, Radish leaf curl virus, Ramie mosaic Yunnan virus, Rhynchosia golden mosaic Havana virus, Rhynchosia golden mosaic Sinaloa virus, Rhynchosia golden mosaic virus, Rhynchosia mild mosaic virus, Rhynchosia rugose golden mosaic virus, Rhynchosia yellow mosaic India virus, Rhynchosia yellow mosaic virus, Rose leaf curl virus, Sauropus leaf curl virus, Senecio yellow mosaic virus, Senna leaf curl virus, Sida angular mosaic virus, Sida bright yellow mosaic virus, Sida chlorotic mottle virus, Sida chlorotic vein virus, Sida ciliaris golden mosaic virus, Sida common mosaic virus, Sida golden mosaic Braco virus, Sida golden mosaic Brazil virus, Sida golden mosaic Buckup virus, Sida golden mosaic Costa Rica virus, Sida golden mosaic Florida virus, Sida golden mosaic Lara virus, Sida golden mosaic virus, Sida golden mottle virus, Sida golden yellow spot virus, Sida golden yellow vein virus, Sida leaf curl virus, Sida micrantha mosaic virus, Sida mosaic Alagoas virus, Sida mosaic Bolivia virus 1, Sida mosaic Bolivia virus 2, Sida mosaic Sinaloa virus, Sida mottle Alagoas virus, Sida mottle virus, Sida yellow blotch virus, Sida yellow leaf curl virus, Sida yellow mosaic Alagoas virus, Sida yellow mosaic China virus, Sida yellow mosaic virus, Sida yellow mosaic Yucatan virus, Sida yellow mottle virus, Sida yellow net virus, Sida yellow vein Vietnam virus, Sida yellow vein virus, Sidastrum golden leaf spot virus, Siegesbeckia yellow vein Guangxi virus, Siegesbeckia yellow vein virus, Solanum mosaic Bolivia virus, South African cassava mosaic virus, Soybean blistering mosaic virus, Soybean chlorotic blotch virus, Soybean mild mottle virus, Spilanthes yellow vein virus, Spinach yellow vein virus, Squash leaf curl China virus, Squash leaf curl Philippines virus, Squash leaf curl virus, Squash leaf curl Yunnan virus, Squash mild leaf curl virus, Sri Lankan cassava mosaic virus, Stachytarpheta leaf curl virus, Sunn hemp leaf distortion virus, Sweet potato golden vein Korea virus, Sweet potato leaf curl Canary virus, Sweet potato leaf curl China virus, Sweet potato leaf curl Georgia virus, Sweet potato leaf curl Guangxi virus, Sweet potato leaf curl Henan virus, Sweet potato leaf curl Hubei virus, Sweet potato leaf curl Sao Paulo virus, Sweet potato leaf curl Shandong virus, Sweet potato leaf curl Sichuan virus 1, Sweet potato leaf curl Sichuan virus 2, Sweet potato leaf curl South Carolina virus, Sweet potato leaf curl virus, Sweet potato mosaic virus, Synedrella yellow vein clearing virus, Telfairia golden mosaic virus, Tobacco curly shoot virus, Tobacco leaf curl Comoros virus, Tobacco leaf curl Cuba virus, Tobacco leaf curl Dominican Republic virus, Tobacco leaf curl Pusa virus, Tobacco leaf curl Thailand virus, Tobacco leaf curl Yunnan virus, Tobacco leaf curl Zimbabwe virus, Tobacco leaf rugose virus, Tobacco mottle leaf curl virus, Tobacco yellow crinkle virus, Tomato bright yellow mosaic virus, Tomato bright yellow mottle virus, Tomato chino La Paz virus, Tomato chlorotic leaf curl virus, Tomato chlorotic leaf distortion virus, Tomato chlorotic mottle Guyane virus, Tomato chlorotic mottle virus, Tomato common mosaic virus, Tomato curly stunt virus, Tomato dwarf leaf virus, Tomato enation leaf curl virus, Tomato golden leaf distortion virus, Tomato golden leaf spot virus, Tomato golden mosaic virus, Tomato golden mottle virus, Tomato golden vein virus, Tomato interveinal chlorosis virus, Tomato latent virus, Tomato leaf curl Anjouan virus, Tomato leaf curl Arusha virus, Tomato leaf curl Bangalore virus, Tomato leaf curl Bangladesh virus, Tomato leaf curl Burkina Faso virus, Tomato leaf curl Cebu virus, Tomato leaf curl China virus, Tomato leaf curl Comoros virus, Tomato leaf curl Diana virus, Tomato leaf curl Ghana virus, Tomato leaf curl Guangdong virus, Tomato leaf curl Guangxi virus, Tomato leaf curl Gujarat virus, Tomato leaf curl Hainan virus, Tomato leaf curl Hanoi virus, Tomato leaf curl Hsinchu virus, Tomato leaf curl Iran virus, Tomato leaf curl Japan virus, Tomato leaf curl Java virus, Tomato leaf curl Joydebpur virus, Tomato leaf curl Karnataka virus, Tomato leaf curl Karnataka virus 2, Tomato leaf curl Karnataka virus 3, Tomato leaf curl Kerala virus, Tomato leaf curl Laos virus, Tomato leaf curl Liwa virus, Tomato leaf curl Madagascar virus, Tomato leaf curl Mahe virus, Tomato leaf curl Malaysia virus, Tomato leaf curl Mali virus, Tomato leaf curl Mindanao virus, Tomato leaf curl Moheli virus, Tomato leaf curl Namakely virus, Tomato leaf curl New Delhi virus, Tomato leaf curl New Delhi virus 2, Tomato leaf curl New Delhi virus 4, Tomato leaf curl New Delhi virus 5, Tomato leaf curl Nigeria virus, Tomato leaf curl Palampur virus, Tomato leaf curl Patna virus, Tomato leaf curl Philippines virus, Tomato leaf curl Pune virus, Tomato leaf curl purple vein virus, Tomato leaf curl Rajasthan virus, Tomato leaf curl Seychelles virus, Tomato leaf curl Sinaloa virus, Tomato leaf curl Sri Lanka virus, Tomato leaf curl Sudan virus, Tomato leaf curl Sulawesi virus, Tomato leaf curl Taiwan virus, Tomato leaf curl Tanzania virus, Tomato leaf curl Toliara virus, Tomato leaf curl Uganda virus, Tomato leaf curl Vietnam virus, Tomato leaf curl virus, Tomato leaf deformation virus, Tomato leaf distortion virus, Tomato mild mosaic virus, Tomato mild yellow leaf curl Aragua virus, Tomato mosaic Havana virus, Tomato mottle leaf curl virus, Tomato mottle Taino virus, Tomato mottle virus, Tomato mottle wrinkle virus, Tomato rugose mosaic virus, Tomato rugose yellow leaf curl virus, Tomato severe leaf curl Kalakada virus, Tomato severe leaf curl virus, Tomato severe rugose virus, Tomato twisted leaf virus, Tomato wrinkled mosaic virus, Tomato yellow leaf curl Axarquia virus, Tomato yellow leaf curl China virus, Tomato yellow leaf curl Guangdong virus, Tomato yellow leaf curl Indonesia virus, Tomato yellow leaf curl Kanchanaburi virus, Tomato yellow leaf curl Malaga virus, Tomato yellow leaf curl Mali virus, Tomato yellow leaf curl Sardinia virus, Tomato yellow leaf curl Shuangbai virus, Tomato yellow leaf curl Thailand virus, Tomato yellow leaf curl Vietnam virus, Tomato yellow leaf curl virus, Tomato yellow leaf curl Yunnan virus, Tomato yellow leaf distortion virus, Tomato yellow margin leaf curl virus, Tomato yellow mottle virus, Tomato yellow spot virus, Tomato yellow vein streak virus, Triumfetta yellow mosaic virus, Velvet bean golden mosaic virus, Velvet bean severe mosaic virus, Vernonia crinkle virus, Vernonia yellow vein Fujian virus, Vernonia yellow vein virus, Vigna yellow mosaic virus, Vinca leaf curl virus, Watermelon chlorotic stunt virus, West African Asystasia virus 1, West African Asystasia virus 2, West African Asystasia virus 3, Whitefly-associated begomovirus 1, Whitefly-associated begomovirus 2, Whitefly-associated begomovirus 3, Whitefly-associated begomovirus 4, Whitefly-associated begomovirus 6, Whitefly-associated begomovirus 7, Wissadula golden mosaic virus, Wissadula yellow mosaic virus, Alfalfa leaf curl virus, Euphorbia caput-medusae latent virus, French bean severe leaf curl virus, Plantago lanceolata latent virus, Beet curly top virus, Horseradish curly top virus, Spinach severe curly top virus, Eragrostis curvula streak virus, Grapevine red blotch virus, Prunus latent virus, Wild Vitis latent virus, Axonopus compressus streak virus, Bromus catharticus striate mosaic virus, Chickpea chlorosis Australia virus, Chickpea chlorosis virus, Chickpea chlorotic dwarf virus, Chickpea redleaf virus, Chickpea yellow dwarf virus, Chickpea yellows virus, Chloris striate mosaic virus, Digitaria ciliaris striate mosaic virus, Digitaria didactyla striate mosaic virus, Digitaria streak virus, Dragonfly-associated mastrevirus, Eragrostis minor streak virus, Eragrostis streak virus, Maize streak dwarfing virus, Maize streak Reunion virus, Maize streak virus, Maize striate mosaic virus, Miscanthus streak virus, Oat dwarf virus, Panicum streak virus, Paspalum dilatatum striate mosaic virus, Paspalum striate mosaic virus, Rice latent virus 1, Rice latent virus 2, Saccharum streak virus, Sporobolus striate mosaic virus 1, Sporobolus striate mosaic virus 2, Sugarcane chlorotic streak virus, Sugarcane streak Egypt virus, Sugarcane streak Reunion virus, Sugarcane streak virus, Sugarcane striate virus, Sugarcane white streak virus, Sweet potato symptomless virus 1, Switchgrass mosaic-associated virus, Tobacco yellow dwarf virus, Urochloa streak virus, Wheat dwarf India virus, Wheat dwarf virus, Tomato pseudo-curly top virus, Sesame curly top virus, Turnip curly top virus, Turnip leaf roll virus, Citrus chlorotic dwarf associated virus, Mulberry mosaic dwarf associated virus, Blackbird associated gemycircularvirus 1, Bovine associated gemycircularvirus 1, Bromus associated gemycircularvirus 1, Cassava associated gemycircularvirus 1, Chickadee associated gemycircularvirus 1, Chicken associated gemycircularvirus 1, Chicken associated gemycircularvirus 2, Dragonfly associated gemycircularvirus 1, Equine associated gemycircularvirus 1, Fur seal associated gemycircularvirus 1, Gerygone associated gemycircularvirus 1, Gerygone associated gemycircularvirus 2, Gerygone associated gemycircularvirus 3, Hypericum associated gemycircularvirus 1, Lama associated gemycircularvirus 1, Mallard associated gemycircularvirus 1, Miniopterus associated gemycircularvirus 1, Mongoose associated gemycircularvirus 1, Mosquito associated gemycircularvirus 1, Odonata associated gemycircularvirus 1, Odonata associated gemycircularvirus 2, Poaceae associated gemycircularvirus 1, Porcine associated gemycircularvirus 1, Porcine associated gemycircularvirus 2, Pteropus associated gemycircularvirus 1, Pteropus associated gemycircularvirus 2, Pteropus associated gemycircularvirus 3, Pteropus associated gemycircularvirus 4, Pteropus associated gemycircularvirus 5, Pteropus associated gemycircularvirus 6, Pteropus associated gemycircularvirus 7, Pteropus associated gemycircularvirus 8, Pteropus associated gemycircularvirus 9, Pteropus associated gemycircularvirus 10, Rat associated gemycircularvirus 1, Sclerotinia gemycircularvirus 1, Sewage derived gemycircularvirus 1, Sewage derived gemycircularvirus 2, Sewage derived gemycircularvirus 3, Sewage derived gemycircularvirus 4, Sewage derived gemycircularvirus 5, Sheep associated gemycircularvirus 1, Soybean associated gemycircularvirus 1, Dragonfly associated gemyduguivirus 1, Canine associated gemygorvirus 1, Mallard associated gemygorvirus 1, Pteropus associated gemygorvirus 1, Sewage derived gemygorvirus 1, Starling associated gemygorvirus 1, Badger associated gemykibivirus 1, Black robin associated gemykibivirus 1, Blackbird associated gemykibivirus 1, Bovine associated gemykibivirus 1, Dragonfly associated gemykibivirus 1, Human associated gemykibivirus 1, Human associated gemykibivirus 2, Human associated gemykibivirus 3, Human associated gemykibivirus 4, Human associated gemykibivirus 5, Mongoose associated gemykibivirus 1, Pteropus associated gemykibivirus 1, Rhinolophus associated gemykibivirus 1, Rhinolophus associated gemykibivirus 2, Sewage derived gemykibivirus 1, Sewage derived gemykibivirus 2, Pteropus associated gemykolovirus 1, Pteropus associated gemykolovirus 2, Bovine associated gemykrogvirus 1, Caribou associated gemykrogvirus 1, Sewage derived gemykrogvirus 1, Rabbit associated gemykroznavirus 1, Ostrich associated gemytondvirus 1, Human associated gemyvongvirus 1, Alphapleolipovirus HHPV1, Alphapleolipovirus HHPV2, Alphapleolipovirus HRPV1, Alphapleolipovirus HRPV2, Alphapleolipovirus HRPV6, Betapleolipovirus HGPV1, Betapleolipovirus HHPV3, Betapleolipovirus HHPV4, Betapleolipovirus HRPV3, Betapleolipovirus HRPV9, Betapleolipovirus HRPV10, Betapleolipovirus HRPV11, Betapleolipovirus HRPV12, Betapleolipovirus SNJ2, Gammapleolipovirus His2, Amasya cherry disease associated chrysovirus, Anthurium mosaic-associated chrysovirus, Aspergillus fumigatus chrysovirus, Brassica campestris chrysovirus, Colletotrichum gloeosporioides chrysovirus, Cryphonectria nitschkei chrysovirus 1, Fusarium oxysporum chrysovirus 1, Helminthosporium victoriae virus 145S, Isaria javanica chrysovirus, Macrophomina phaseolina chrysovirus, Penicillium brevicompactum virus, Penicillium chrysogenum virus, Penicillium cyaneofulvum virus, Persea americana chrysovirus, Raphanus sativus chrysovirus, Shuangao insect-associated chrysovirus, Verticillium dahliae chrysovirus 1, Alternaria alternata chrysovirus, Botryosphaeria dothidea chrysovirus, Colletotrichum fructicola chrysovirus 1, Fusarium graminearum chrysovirus, Fusarium oxysporum chrysovirus 2, Magnaporthe oryzae chrysovirus, Penicillium janczewskii chrysovirus 1, Penicillium janczewskii chrysovirus 2, Rosellinia necatrix megabirnavirus 1, Rosellinia necatrix quadrivirus 1, Giardia lamblia virus, Leishmania RNA virus 1, Leishmania RNA virus 2, Saccharomyces cerevisiae virus L-A, Saccharomyces cerevisiae virus LBCLa, Scheffersomyces segobiensis virus L, Tuber aestivum virus 1, Ustilago maydis virus H1, Xanthophyllomyces dendrorhous virus L1A, Xanthophyllomyces dendrorhous virus L1B, Trichomonas vaginalis virus 1, Trichomonas vaginalis virus 2, Trichomonas vaginalis virus 3, Trichomonas vaginalis virus 4, Aspergillus foetidus slow virus 1, Beauveria bassiana victorivirus 1, Chalara elegans RNA Virus 1, Coniothyrium minitans RNA virus, Epichloe festucae virus 1, Gremmeniella abietina RNA virus L1, Helicobasidium mompa totivirus 1-17, Helminthosporium victoriae virus 190S, Magnaporthe oryzae virus 1, Magnaporthe oryzae virus 2, Rosellinia necatrix victorivirus 1, Sphaeropsis sapinea RNA virus 1, Sphaeropsis sapinea RNA virus 2, Tolypocladium cylindrosporum virus 1, Eriocheir sinensis reovirus, Micromonas pusilla reovirus, African horse sickness virus, Bluetongue virus, Changuinola virus, Chenuda virus, Chobar Gorge virus, Corriparta virus, Epizootic hemorrhagic disease virus, Equine encephalosis virus, Eubenangee virus, Great Island virus, Teri virus, Lebombo virus, Orungo virus, Palyam virus, Peruvian horse sickness virus, St Croix River virus, Umatilla virus, Wad Medani virus, Wallal virus, Warrego virus, Wongorr virus, Yunnan orbivirus, Rice dwarf virus, Rice gall dwarf virus, Wound tumor virus, Rotavirus A, Rotavirus B, Rotavirus C, Rotavirus D, Rotavirus F, Rotavirus G, Rotavirus H, Rotavirus I, Rotavirus J, Banna virus, Kadipiro virus, Liao ning virus, Aquareovirus A, Aquareovirus B, Aquareovirus C, Aquareovirus D, Aquareovirus E, Aquareovirus F, Aquareovirus G, Colorado tick fever coltivirus, Eyach coltivirus, Kundal coltivirus, Tai Forest coltivirus, Tarumizu coltivirus, Cypovirus 1, Cypovirus 2, Cypovirus 3, Cypovirus 4, Cypovirus 5, Cypovirus 6, Cypovirus 7, Cypovirus 8, Cypovirus 9, Cypovirus 10, Cypovirus 11, Cypovirus 12, Cypovirus 13, Cypovirus 14, Cypovirus 15, Cypovirus 16, Aedes pseudoscutellaris reovirus, Fiji disease virus, Garlic dwarf virus, Maize rough dwarf virus, Mal de Rio Cuarto virus, Nilaparvata lugens reovirus, Oat sterile dwarf virus, Pangola stunt virus, Rice black streaked dwarf virus, Southern rice black-streaked dwarf virus, Idnoreovirus 1, Idnoreovirus 2, Idnoreovirus 3, Idnoreovirus 4, Idnoreovirus 5, Mycoreovirus 1, Mycoreovirus 2, Mycoreovirus 3, Avian orthoreovirus, Baboon orthoreovirus, Broome orthoreovirus, Mahlapitsi orthoreovirus, Mammalian orthoreovirus, Nelson Bay orthoreovirus, Neoavian orthoreovirus, Piscine orthoreovirus, Reptilian orthoreovirus, Testudine orthoreovirus, Echinochloa ragged stunt virus, Rice ragged stunt virus, Pseudomonas virus phi6, Pseudomonas virus phi8, Pseudomonas virus phi12, Pseudomonas virus phi13, Pseudomonas virus phi2954, Pseudomonas virus phiNN, Pseudomonas virus phiYY, Antheraea eucalypti virus, Darna trima virus, Dasychira pudibunda virus, Nudaurelia capensis beta virus, Philosamia cynthia x ricini virus, Pseudoplusia includens virus, Trichoplusia ni virus, Dendrolimus punctatus virus, Helicoverpa armigera stunt virus, Nudaurelia capensis omega virus, Beet necrotic yellow vein virus, Beet soil-borne mosaic virus, Burdock mottle virus, Rice stripe necrosis virus, Orthohepevirus A, Orthohepevirus B, Orthohepevirus C, Orthohepevirus D, Piscihepevirus A, Rubella virus, Alfalfa mosaic virus, Amazon lily mild mottle virus, Pelargonium zonate spot virus, Broad bean mottle virus, Brome mosaic virus, Cassia yellow blotch virus, Cowpea chlorotic mottle virus, Melandrium yellow fleck virus, Spring beauty latent virus, Cucumber mosaic virus, Gayfeather mild mottle virus, Peanut stunt virus, Tomato aspermy virus, Ageratum latent virus, American plum line pattern virus, Apple mosaic virus, Asparagus virus 2, Blackberry chlorotic ringspot virus, Blueberry shock virus, Citrus leaf rugose virus, Citrus variegation virus, Elm mottle virus, Fragaria chiloensis latent virus, Humulus japonicus latent virus, Lilac leaf chlorosis virus, Lilac ring mottle virus, Parietaria mottle virus, Privet ringspot virus, Prune dwarf virus, Prunus necrotic ringspot virus, Spinach latent virus, Strawberry necrotic shock virus, Tobacco streak virus, Tomato necrotic streak virus, Tulare apple mosaic virus, Olive latent virus 2, Air potato ampelovirus 1, Blackberry vein banding-associated virus, Grapevine leafroll-associated virus 1, Grapevine leafroll-associated virus 3, Grapevine leafroll-associated virus 4, Grapevine leafroll-associated virus 13, Little cherry virus 2, Pineapple mealybug wilt-associated virus 1, Pineapple mealybug wilt-associated virus 2, Pineapple mealybug wilt-associated virus 3, Pistachio ampelovirus A, Plum bark necrosis stem pitting-associated virus, Arracacha virus 1, Beet yellow stunt virus, Beet yellows virus, Blackcurrant closterovirus 1, Burdock yellows virus, Carnation necrotic fleck virus, Carrot yellow leaf virus, Citrus tristeza virus, Grapevine leafroll-associated virus 2, Mint virus 1, Raspberry leaf mottle virus, Rehmannia virus 1, Rose leaf rosette-associated virus, Strawberry chlorotic fleck-associated virus, Tobacco virus 1, Wheat yellow leaf virus, Abutilon yellows virus, Bean yellow disorder virus, Beet pseudoyellows virus, Blackberry yellow vein-associated virus, Cucurbit yellow stunting disorder virus, Diodia vein chlorosis virus, Lettuce chlorosis virus, Lettuce infectious yellows virus, Potato yellow vein virus, Strawberry pallidosis-associated virus, Sweet potato chlorotic stunt virus, Tetterwort vein chlorosis virus, Tomato chlorosis virus, Tomato infectious chlorosis virus, Areca palm velarivirus 1, Cordyline virus 1, Cordyline virus 2, Cordyline virus 3, Cordyline virus 4, Grapevine leafroll-associated virus 7, Little cherry virus 1, Actinidia virus 1, Alligatorweed stunting virus, Blueberry virus A, Megakepasma mosaic virus, Mint vein banding-associated virus, Olive leaf yellowing-associated virus, Persimmon virus B, Agaricus bisporus alphaendornavirus 1, Basella alba alphaendornavirus 1, Bell pepper alphaendornavirus, Cluster bean alphaendornavirus 1, Cucumis melo alphaendornavirus, Erysiphe cichoracearum alphaendornavirus, Grapevine endophyte alphaendornavirus, Helianthus annuus alphaendornavirus, Helicobasidium mompa alphaendornavirus 1, Hordeum vulgare alphaendornavirus, Hot pepper alphaendornavirus, Lagenaria siceraria alphaendornavirus, Oryza rufipogon alphaendornavirus, Oryza sativa alphaendornavirus, Persea americana alphaendornavirus 1, Phaseolus vulgaris alphaendornavirus 1, Phaseolus vulgaris alphaendornavirus 2, Phaseolus vulgaris alphaendornavirus 3, Phytophthora alphaendornavirus 1, Rhizoctonia cerealis alphaendornavirus 1, Rhizoctonia solani alphaendornavirus 2, Vicia faba alphaendornavirus, Winged bean alphaendornavirus 1, Yerba mate alphaendornavirus, Alternaria brassicicola betaendornavirus 1, Botrytis cinerea betaendornavirus 1, Gremmeniella abietina betaendornavirus 1, Rosellinia necatrix betaendornavirus 1, Sclerotinia minor betaendornavirus 1, Sclerotinia sclerotiorum betaendornavirus 1, Tuber aestivum betaendornavirus, Blueberry necrotic ring blotch virus, Tea plant necrotic ring blotch virus, Citrus leprosis virus C, Citrus leprosis virus C2, Hibiscus green spot virus 2, Privet idaeovirus, Raspberry bushy dwarf virus, Japanese holly fern mottle pteridovirus, Maize associated pteridovirus, Aura virus, Barmah Forest virus, Bebaru virus, Cabassou virus, Chikungunya virus, Eastern equine encephalitis virus, Eilat virus, Everglades virus, Fort Morgan virus, Getah virus, Highlands J virus, Madariaga virus, Mayaro virus, Middelburg virus, Mosso das Pedras virus, Mucambo virus, Ndumu virus, Onyong-nyong virus, Pixuna virus, Rio Negro virus, Ross River virus, Salmon pancreas disease virus, Semliki Forest virus, Sindbis virus, Southern elephant seal virus, Tonate virus, Trocara virus, Una virus, Venezuelan equine encephalitis virus, Western equine encephalitis virus, Whataroa virus, Chinese wheat mosaic virus, Japanese soil-borne wheat mosaic virus, Oat golden stripe virus, Soil-borne cereal mosaic virus, Soil-borne wheat mosaic virus, Sorghum chlorotic spot virus, Drakaea virus A, Gentian ovary ringspot virus, Anthoxanthum latent blanching virus, Barley stripe mosaic virus, Lychnis ringspot virus, Poa semilatent virus, Indian peanut clump virus, Peanut clump virus, Beet soil-borne virus, Beet virus Q, Broad bean necrosis virus, Colombian potato soil-borne virus, Potato mop-top virus, Bell pepper mottle virus, Brugmansia mild mottle virus, Cactus mild mottle virus, Clitoria yellow mottle virus, Cucumber fruit mottle mosaic virus, Cucumber green mottle mosaic virus, Cucumber mottle virus, Frangipani mosaic virus, Hibiscus latent Fort Pierce virus, Hibiscus latent Singapore virus, Kyuri green mottle mosaic virus, Maracuj a mosaic virus, Obuda pepper virus, Odontoglossum ringspot virus, Opuntia chlorotic ringspot virus, Paprika mild mottle virus, Passion fruit mosaic virus, Pepper mild mottle virus, Plumeria mosaic virus, Rattail cactus necrosis-associated virus, Rehmannia mosaic virus, Ribgrass mosaic virus, Streptocarpus flower break virus, Sunn-hemp mosaic virus, Tobacco latent virus, Tobacco mild green mosaic virus, Tobacco mosaic virus, Tomato brown rugose fruit virus, Tomato mosaic virus, Tomato mottle mosaic virus, Tropical soda apple mosaic virus, Turnip vein-clearing virus, Ullucus mild mottle virus, Wasabi mottle virus, Yellow tailflower mild mottle virus, Youcai mosaic virus, Zucchini green mottle mosaic virus, Pea early-browning virus, Pepper ringspot virus, Tobacco rattle virus, Alfalfa virus S, Arachis pintoi virus, Blackberry virus E, Garlic mite-borne filamentous virus, Garlic virus A, Garlic virus B, Garlic virus C, Garlic virus D, Garlic virus E, Garlic virus X, Shallot virus X, Vanilla latent virus, Botrytis virus X, Lolium latent virus, Citrus yellow vein clearing virus, Indian citrus ringspot virus, Donkey orchid symptomless virus, Actinidia virus X, Allium virus X, Alstroemeria virus X, Alternanthera mosaic virus, Asparagus virus 3, Bamboo mosaic virus, Cactus virus X, Cassava common mosaic virus, Cassava virus X, Clover yellow mosaic virus, Cymbidium mosaic virus, Foxtail mosaic virus, Hosta virus X, Hydrangea ringspot virus, Lagenaria mild mosaic virus, Lettuce virus X, Lily virus X, Malva mosaic virus, Mint virus X, Narcissus mosaic virus, Nerine virus X, Opuntia virus X, Papaya mosaic virus, Pepino mosaic virus, Phaius virus X, Pitaya virus X, Plantago asiatica mosaic virus, Plantain virus X, Potato aucuba mosaic virus, Potato virus X, Schlumbergera virus X, Strawberry mild yellow edge virus, Tamus red mosaic virus, Tulip virus X, Vanilla virus X, White clover mosaic virus, Yam virus X, Zygocactus virus X, Sclerotinia sclerotiorum debilitation-associated RNA virus, Aconitum latent virus, American hop latent virus, Atractylodes mottle virus, Blueberry scorch virus, Butterbur mosaic virus, Cactus virus 2, Caper latent virus, Carnation latent virus, Chrysanthemum virus B, Cole latent virus, Coleus vein necrosis virus, Cowpea mild mottle virus, Cucumber vein-clearing virus, Daphne virus S, Gaillardia latent virus, Garlic common latent virus, Helenium virus S, Helleborus mosaic virus, Helleborus net necrosis virus, Hippeastrum latent virus, Hop latent virus, Hop mosaic virus, Hydrangea chlorotic mottle virus, Kalanchoe latent virus, Ligustrum necrotic ringspot virus, Ligustrum virus A, Lily symptomless virus, Melon yellowing-associated virus, Mirabilis jalapa mottle virus, Narcissus common latent virus, Nerine latent virus, Passiflora latent virus, Pea streak virus, Phlox virus B, Phlox virus M, Phlox virus S, Poplar mosaic virus, Potato latent virus, Potato virus H, Potato virus M, Potato virus P, Potato virus S, Red clover vein mosaic virus, Sambucus virus C, Sambucus virus D, Sambucus virus E, Shallot latent virus, Sint-Jan onion latent virus, Strawberry pseudo mild yellow edge virus, Sweet potato C6 virus, Sweet potato chlorotic fleck virus, Verbena latent virus, Yam latent virus, Apple stem pitting virus, Apricot latent virus, Asian prunus virus 1, Asian prunus virus 2, Grapevine rupestris stem pitting-associated virus, Grapevine virus T, Peach chlorotic mottle virus, Rubus canadensis virus 1, African oil palm ringspot virus, Cherry green ring mottle virus, Cherry necrotic rusty mottle virus, Cherry rusty mottle associated virus, Cherry twisted leaf associated virus, Banana mild mosaic virus, Banana virus X, Sugarcane striate mosaic-associated virus, Apple stem grooving virus, Cherry virus A, Currant virus A, Mume virus A, Carrot Ch virus 1, Carrot Ch virus 2, Citrus leaf blotch virus, Diuris virus A, Diuris virus B, Hardenbergia virus A, Actinidia seed borne latent virus, Apricot vein clearing associated virus, Caucasus prunus virus, Ribes americanum virus A, Potato virus T, Prunus virus T, Apple chlorotic leaf spot virus, Apricot pseudo-chlorotic leaf spot virus, Cherry mottle leaf virus, Grapevine berry inner necrosis virus, Grapevine Pinot gris virus, Peach mosaic virus, Phlomis mottle virus, Actinidia virus A, Actinidia virus B, Arracacha virus V, Blackberry virus A, Grapevine virus A, Grapevine virus B, Grapevine virus D, Grapevine virus E, Grapevine virus F, Grapevine virus G, Grapevine virus H, Grapevine virus I, Grapevine virus J, Heracleum latent virus, Mint virus 2, Watermelon virus A, Fusarium deltaflexivirus 1, Sclerotinia deltaflexivirus 1, Soybean-associated deltaflexivirus 1, Botrytis virus F, Grapevine fleck virus, Bermuda grass etched-line virus, Blackberry virus S, Citrus sudden death-associated virus, Grapevine asteroid mosaic associated virus, Grapevine Syrah virus 1, Maize rayado fino virus, Nectarine marafivirus M, Oat blue dwarf virus, Olive latent virus 3, Peach marafivirus D, Anagyris vein yellowing virus, Andean potato latent virus, Andean potato mild mosaic virus, Belladonna mottle virus, Cacao yellow mosaic virus, Calopogonium yellow vein virus, Chayote mosaic virus, Chiltepin yellow mosaic virus, Clitoria yellow vein virus, Desmodium yellow mottle virus, Dulcamara mottle virus, Eggplant mosaic virus, Erysimum latent virus, Kennedya yellow mosaic virus, Melon rugose mosaic virus, Nemesia ring necrosis virus, Okra mosaic virus, Ononis yellow mosaic virus, Passion fruit yellow mosaic virus, Peanut yellow mosaic virus, Petunia vein banding virus, Physalis mottle virus, Plantago mottle virus, Scrophularia mottle virus, Tomato blistering mosaic tymovirus, Turnip yellow mosaic virus, Voandzeia necrotic mosaic virus, Wild cucumber mosaic virus, Bombyx mori latent virus, Poinsettia mosaic virus, Apoi virus, Aroa virus, Bagaza virus, Banzi virus, Bouboui virus, Bukalasa bat virus, Cacipacore virus, Carey Island virus, Cowbone Ridge virus, Dakar bat virus, Dengue virus, Edge Hill virus, Entebbe bat virus, Gadgets Gully virus, Ilheus virus, Israel turkey meningoencephalomyelitis virus, Japanese encephalitis virus, Jugra virus, Jutiapa virus, Kadam virus, Kedougou virus, Kokobera virus, Koutango virus, Kyasanur Forest disease virus, Langat virus, Louping ill virus, Meaban virus, Modoc virus, Montana myotis leukoencephalitis virus, Murray Valley encephalitis virus, Ntaya virus, Omsk hemorrhagic fever virus, Phnom Penh bat virus, Powassan virus, Rio Bravo virus, Royal Farm virus, Saboya virus, Saint Louis encephalitis virus, Sal Vieja virus, San Perlita virus, Saumarez Reef virus, Sepik virus, Tembusu virus, Tick-borne encephalitis virus, Tyuleniy virus, Uganda S virus, Usutu virus, Wesselsbron virus, West Nile virus, Yaounde virus, Yellow fever virus, Yokose virus, Zika virus, Hepacivirus A, Hepacivirus B, Hepacivirus C, Hepacivirus D, Hepacivirus E, Hepacivirus F, Hepacivirus G, Hepacivirus H, Hepacivirus I, Hepacivirus J, Hepacivirus K, Hepacivirus L, Hepacivirus M, Hepacivirus N, Pegivirus A, Pegivirus B, Pegivirus C, Pegivirus D, Pegivirus E, Pegivirus F, Pegivirus G, Pegivirus H, Pegivirus I, Pegivirus J, Pegivirus K, Pestivirus A, Pestivirus B, Pestivirus C, Pestivirus D, Pestivirus E, Pestivirus F, Pestivirus G, Pestivirus H, Pestivirus I, Pestivirus J, Pestivirus K, Black beetle virus, Boolarra virus, Flock House virus, Nodamura virus, Pariacoto virus, Barfin flounder nervous necrosis virus, Redspotted grouper nervous necrosis virus, Striped jack nervous necrosis virus, Tiger puffer nervous necrosis virus, Lake Sinai virus 1, Lake Sinai virus 2, Providence virus, Alfalfa enamovirus 1, Birdsfoot trefoil enamovirus 1, Citrus vein enation virus, Grapevine enamovirus 1, Pea enation mosaic virus 1, Apple associated luteovirus, Apple luteovirus 1, Barley yellow dwarf virus kern, Barley yellow dwarf virus kerIII, Barley yellow dwarf virus MAV, Barley yellow dwarf virus PAS, Barley yellow dwarf virus PAV, Bean leafroll virus, Cherry associated luteovirus, Nectarine stem pitting associated virus, Red clover associated luteovirus, Rose spring dwarf-associated virus, Soybean dwarf virus, Beet chlorosis virus, Beet mild yellowing virus, Beet western yellows virus, Carrot red leaf virus, Cereal yellow dwarf virus RPS, Cereal yellow dwarf virus RPV, Chickpea chlorotic stunt virus, Cotton leafroll dwarf virus, Cucurbit aphid-borne yellows virus, Faba bean polerovirus 1, Maize yellow dwarf virus RMV, Maize yellow mosaic virus, Melon aphid-borne yellows virus, Pepo aphid-borne yellows virus, Pepper vein yellows virus 1, Pepper vein yellows virus 2, Pepper vein yellows virus 3, Pepper vein yellows virus 4, Pepper vein yellows virus 5, Pepper vein yellows virus 6, Potato leafroll virus, Pumpkin polerovirus, Suakwa aphid-borne yellows virus, Sugarcane yellow leaf virus, Tobacco vein distorting virus, Turnip yellows virus, Barley yellow dwarf virus GPV, Barley yellow dwarf virus SGV, Chickpea stunt disease associated virus, Groundnut rosette assistor virus, Indonesian soybean dwarf virus, Sweet potato leaf speckling virus, Tobacco necrotic dwarf virus, Carrot mottle mimic virus, Carrot mottle virus, Ethiopian tobacco bushy top virus, Groundnut rosette virus, Lettuce speckles mottle virus, Opium poppy mosaic virus, Pea enation mosaic virus 2, Tobacco bushy top virus, Tobacco mottle virus, Angelonia flower break virus, Calibrachoa mottle virus, Carnation mottle virus, Honeysuckle ringspot virus, Nootka lupine vein clearing virus, Pelargonium flower break virus, Saguaro cactus virus, Olive latent virus 1, Olive mild mosaic virus, Potato necrosis virus, Tobacco necrosis virus A, Cucumber leaf spot virus, Johnsongrass chlorotic stripe mosaic virus, Maize white line mosaic virus, Pothos latent virus, Yam spherical virus, Oat chlorotic stunt virus, Cardamine chlorotic fleck virus, Hibiscus chlorotic ringspot virus, Japanese iris necrotic ring virus, Turnip crinkle virus, Beet black scorch virus, Leek white stripe virus, Tobacco necrosis virus D, Galinsoga mosaic virus, Cowpea mottle virus, Melon necrotic spot virus, Pea stem necrosis virus, Soybean yellow mottle mosaic virus, Furcraea necrotic streak virus, Maize chlorotic mottle virus, Cocksfoot mild mosaic virus, Panicum mosaic virus, Thin paspalum asymptomatic virus, Clematis chlorotic mottle virus, Elderberry latent virus, Pelargonium chlorotic ring pattern virus, Pelargonium line pattern virus, Pelargonium ringspot virus, Rosa rugosa leaf distortion virus, Artichoke mottled crinkle virus, Carnation Italian ringspot virus, Cucumber Bulgarian latent virus, Cucumber necrosis virus, Cymbidium ringspot virus, Eggplant mottled crinkle virus, Grapevine Algerian latent virus, Havel River virus, Lato River virus, Limonium flower distortion virus, Moroccan pepper virus, Neckar River virus, Pelargonium leaf curl virus, Pelargonium necrotic spot virus, Petunia asteroid mosaic virus, Sitke waterborne virus, Tomato bushy stunt virus, Maize necrotic streak virus, Ahlum waterborne virus, Bean mild mosaic virus, Chenopodium necrosis virus, Cucumber soil-borne virus, Trailing lespedeza virus 1, Weddel waterborne virus, Carnation ringspot virus, Red clover necrotic mosaic virus, Sweet clover necrotic mosaic virus, Escherichia virus FI, Escherichia virus Qbeta, Escherichia virus BZ13, Escherichia virus MS2, Saccharomyces 20S RNA narnavirus, Saccharomyces 23S RNA narnavirus, Cryphonectria mitovirus 1, Ophiostoma mitovirus 4, Ophiostoma mitovirus 5, Ophiostoma mitovirus 6, Ophiostoma mitovirus 3a, Botrytis botoulivirus, Sclerotinia botoulivirus 2, Magnaporthe magoulivirus 1, Rhizoctonia magoulivirus 1, Cassava virus C, Epirus cherry virus, Ourmia melon virus, Sclerotinia scleroulivirus 1, Soybean scleroulivirus 1, Soybean scleroulivirus 2, Beihai yingvirus, Charybdis yingvirus, Hubei yingvirus, Sanxia yingvirus, Shahe yingvirus, Wenzhou yingvirus, Wuhan yingvirus, Xinzhou yingvirus, Blueberry mosaic associated ophiovirus, Citrus psorosis ophiovirus, Freesia sneak ophiovirus, Lettuce ring necrosis ophiovirus, Mirafiori lettuce big-vein ophiovirus, Ranunculus white mottle ophiovirus, Tulip mild mottle mosaic ophiovirus, Argas mivirus, Barnacle mivirus, Beetle mivirus, Bole mivirus, Brunnich mivirus, Changping mivirus, Charybdis mivirus, Cockroach mivirus, Crab mivirus, Crustacean mivirus, Dermacentor mivirus, Hermit mivirus, Hippoboscid mivirus, Hubei mivirus, Hubei odonate mivirus, Imjin mivirus, Lacewing mivirus, Lishi mivirus, Lonestar mivirus, Louse fly mivirus, Mosquito mivirus, Myriapod mivirus, Odonate mivirus, Sanxia mivirus, Shayang mivirus, Suffolk mivirus, Taiyuan mivirus, Wenling mivirus, Wuhan mivirus, Xinzhou mivirus, Barnacle hexartovirus, Caligid hexartovirus, Beihai peropuvirus, Hubei peropuvirus, Odonate peropuvirus, Pillworm peropuvirus, Pteromalus puparum peropuvirus, Woodlouse peropuvirus, Queensland carbovirus, Southwest carbovirus, Sharpbelly cultervirus, Elapid 1 orthobornavirus, Mammalian 1 orthobornavirus, Mammalian 2 orthobornavirus, Passeriform 1 orthobornavirus, Passeriform 2 orthobornavirus, Psittaciform 1 orthobornavirus, Psittaciform 2 orthobornavirus, Waterbird 1 orthobornavirus, Lloviu cuevavirus, Mengla dianlovirus, Bombali ebolavirus, Bundibugyo ebolavirus, Reston ebolavirus, Sudan ebolavirus, Tai Forest ebolavirus, Zaire ebolavirus, Marburg marburgvirus, Xilang striavirus, Huangjiao thamnovirus, Gerrid arlivirus, Hubei arlivirus, Lishi arlivirus, Odonate arlivirus, Tacheng arlivirus, Wuchang arlivirus, Hubei hubramonavirus, Lentinula hubramonavirus, Dadou sclerotimonavirus, Drop sclerotimonavirus, Glycine sclerotimonavirus, Hubei sclerotimonavirus, Illinois sclerotimonavirus, Phyllosphere sclerotimonavirus, Sclerotinia sclerotimonavirus, Beihai berhavirus, Echinoderm berhavirus, Sipunculid berhavirus, Beihai crustavirus, Wenling crustavirus, Wenzhou crustavirus, Midway nyavirus, Nyamanini nyavirus, Sierra Nevada nyavirus, Orinoco orinovirus, Soybean cyst nematode socyvirus, Tapeworm tapwovirus, Avian metaavulavirus 2, Avian metaavulavirus 5, Avian metaavulavirus 6, Avian metaavulavirus 7, Avian metaavulavirus 8, Avian metaavulavirus 10, Avian metaavulavirus 11, Avian metaavulavirus 14, Avian metaavulavirus 15, Avian metaavulavirus 20, Avian orthoavulavirus 1, Avian orthoavulavirus 9, Avian orthoavulavirus 12, Avian orthoavulavirus 13, Avian orthoavulavirus 16, Avian orthoavulavirus 17, Avian orthoavulavirus 18, Avian orthoavulavirus 19, Avian orthoavulavirus 21, Avian orthovulavirus 21, Avian paraavulavirus 3, Avian paraavulavirus 4, Synodus synodonvirus, Oncorhynchus aquaparamyxovirus, Salmo aquaparamyxovirus, Reptilian ferlavirus, Cedar henipavirus, Ghanaian bat henipavirus, Hendra henipavirus, Mojiang henipavirus, Nipah henipavirus, Beilong jeilongvirus, Jun jeilongvirus, Lophuromys jeilongvirus 1, Lophuromys jeilongvirus 2, Miniopteran jeilongvirus, Myodes jeilongvirus, Tailam jeilongvirus, Canine morbillivirus, Cetacean morbillivirus, Feline morbillivirus, Measles morbillivirus, Phocine morbillivirus, Rinderpest morbillivirus, Small ruminant morbillivirus, Mossman narmovirus, Myodes narmovirus, Nariva narmovirus, Tupaia narmovirus, Bovine respirovirus 3, Caprine respirovirus 3, Human respirovirus 1, Human respirovirus 3, Murine respirovirus, Porcine respirovirus 1, Squirrel respirovirus, Salem salemvirus, Human orthorubulavirus 2, Human orthorubulavirus 4, Mammalian orthorubulavirus 5, Mammalian orthorubulavirus 6, Mapuera orthorubulavirus, Mumps orthorubulavirus, Porcine orthorubulavirus, Simian orthorubulavirus, Achimota pararubulavirus 1, Achimota pararubulavirus 2, Hervey pararubulavirus, Menangle pararubulavirus, Sosuga pararubulavirus, Teviot pararubulavirus, Tioman pararubulavirus, Tuhoko pararubulavirus 1, Tuhoko pararubulavirus 2, Tuhoko pararubulavirus 3, Cynoglossus cynoglossusvirus, Hoplichthys hoplichthysvirus, Scoliodon scoliodonvirus, Avian metapneumovirus, Human metapneumovirus, Bovine orthopneumovirus, Human orthopneumovirus, Murine orthopneumovirus, Arboretum almendravirus, Balsa almendravirus, Coot Bay almendravirus, Menghai almendravirus, Puerto Almendras almendravirus, Rio Chico almendravirus, Xingshan alphanemrhavirus, Xinzhou alphanemrhavirus, Eggplant mottled dwarf alphanucleorhabdovirus, Maize Iranian mosaic alphanucleorhabdovirus, Maize mosaic alphanucleorhabdovirus, Morogoro maize-associated alphanucleorhabdovirus, Physostegia chlorotic mottle alphanucleorhabdovirus, Potato yellow dwarf alphanucleorhabdovirus, Rice yellow stunt alphanucleorhabdovirus, Taro vein chlorosis alphanucleorhabdovirus, Wheat yellow striate alphanucleorhabdovirus, Aruac arurhavirus, Inhangapi arurhavirus, Santabarbara arurhavirus, Xiburema arurhavirus, Bahia barhavirus, Muir barhavirus, Alfalfa betanucleorhabdovirus, Blackcurrant betanucleorhabdovirus, Datura yellow vein betanucleorhabdovirus, Sonchus yellow net betanucleorhabdovirus, Sowthistle yellow vein betanucleorhabdovirus, Trefoil betanucleorhabdovirus, Caligus caligrhavirus, Lepeophtheirus caligrhavirus, Salmonlouse caligrhavirus, Curionopolis curiovirus, Iriri curiovirus, Itacaiunas curiovirus, Rochambeau curiovirus, Alfalfa dwarf cytorhabdovirus, Barley yellow striate mosaic cytorhabdovirus, Broccoli necrotic yellows cytorhabdovirus, Cabbage cytorhabdovirus, Colocasia bobone disease-associated cytorhabdovirus, Festuca leaf streak cytorhabdovirus, Lettuce necrotic yellows cytorhabdovirus, Lettuce yellow mottle cytorhabdovirus, Maize yellow striate cytorhabdovirus, Maize-associated cytorhabdovirus, Northern cereal mosaic cytorhabdovirus, Papaya cytorhabdovirus, Persimmon cytorhabdovirus, Raspberry vein chlorosis cytorhabdovirus, Rice stripe mosaic cytorhabdovirus, Sonchus cytorhabdovirus 1, Strawberry crinkle cytorhabdovirus, Tomato yellow mottle-associated cytorhabdovirus, Wheat American striate mosaic cytorhabdovirus, Wuhan 4 insect cytorhabdovirus, Wuhan 5 insect cytorhabdovirus, Wuhan 6 insect cytorhabdovirus, Yerba mate chlorosis-associated cytorhabdovirus, Citrus chlorotic spot dichorhavirus, Citrus leprosis N dichorhavirus, Clerodendrum chlorotic spot dichorhavirus, Coffee ringspot dichorhavirus, Orchid fleck dichorhavirus, Adelaide River ephemerovirus, Berrimah ephemerovirus, Bovine fever ephemerovirus, Kimberley ephemerovirus, Koolpinyah ephemerovirus, Kotonkan ephemerovirus, Obodhiang ephemerovirus, Yata ephemerovirus, Maize fine streak gammanucleorhabdovirus, Flanders hapavirus, Gray Lodge hapavirus, Hart Park hapavirus, Holmes hapavirus, Joinjakaka hapavirus, Kamese hapavirus, La Joya hapavirus, Landjia hapavirus, Manitoba hapavirus, Marco hapavirus, Mosqueiro hapavirus, Mossuril hapavirus, Ngaingan hapavirus, Ord River hapavirus, Parry Creek hapavirus, Wongabel hapavirus, Barur ledantevirus, Fikirini ledantevirus, Fukuoka ledantevirus, Kanyawara ledantevirus, Kern Canyon ledantevirus, Keuraliba ledantevirus, Kolente ledantevirus, Kumasi ledantevirus, Le Dantec ledantevirus, Mount Elgon bat ledantevirus, Nishimuro ledantevirus, Nkolbisson ledantevirus, Oita ledantevirus, Vaprio ledantevirus, Wuhan ledantevirus, Yongjia ledantevirus, Lonestar zarhavirus, Aravan lyssavirus, Australian bat lyssavirus, Bokeloh bat lyssavirus, Duvenhage lyssavirus, European bat 1 lyssavirus, European bat 2 lyssavirus, Gannoruwa bat lyssavirus, Ikoma lyssavirus, Irkut lyssavirus, Khuj and lyssavirus, Lagos bat lyssavirus, Lleida bat lyssavirus, Mokola lyssavirus, Rabies lyssavirus, Shimoni bat lyssavirus, Taiwan bat lyssavirus, West Caucasian bat lyssavirus, Moussa mousrhavirus, Hirame novirhabdovirus, Piscine novirhabdovirus, Salmonid novirhabdovirus, Snakehead novirhabdovirus, Culex ohlsrhavirus, Northcreek ohlsrhavirus, Ohlsdorf ohlsrhavirus, Riverside ohlsrhavirus, Tongilchon ohlsrhavirus, Anguillid perhabdovirus, Perch perhabdovirus, Sea trout perhabdovirus, Connecticut sawgrhavirus, Island sawgrhavirus, Minto sawgrhavirus, Sawgrass sawgrhavirus, Drosophila affinis sigmavirus, Drosophila ananassae sigmavirus, Drosophila immigrans sigmavirus, Drosophila melanogaster sigmavirus, Drosophila obscura sigmavirus, Drosophila tristis sigmavirus, Muscina stabulans sigmavirus, Carp sprivivirus, Pike fry sprivivirus, Almpiwar sripuvirus, Chaco sripuvirus, Charleville sripuvirus, Cuiaba sripuvirus, Hainan sripuvirus, Niakha sripuvirus, Sena Madureira sripuvirus, Sripur sripuvirus, Garba sunrhavirus, Harrison sunrhavirus, Kwatta sunrhavirus, Oakvale sunrhavirus, Sunguru sunrhavirus, Walkabout sunrhavirus, Bas-Congo tibrovirus, Beatrice Hill tibrovirus, Coastal Plains tibrovirus, Ekpoma 1 tibrovirus, Ekpoma 2 tibrovirus, Sweetwater Branch tibrovirus, Tibrogargan tibrovirus, Durham tupavirus, Klamath tupavirus, Tupaia tupavirus, Lettuce big-vein associated varicosavirus, Alagoas vesiculovirus, American bat vesiculovirus, Carajas vesiculovirus, Chandipura vesiculovirus, Cocal vesiculovirus, Indiana vesiculovirus, Isfahan vesiculovirus, Jurona vesiculovirus, Malpais Spring vesiculovirus, Maraba vesiculovirus, Morreton vesiculovirus, New Jersey vesiculovirus, Perinet vesiculovirus, Piry vesiculovirus, Radi vesiculovirus, Yug Bogdanovac vesiculovirus, Zahedan zarhavirus, Reptile sunshinevirus 1, Bolahun anphevirus, Dipteran anphevirus, Drosophilid anphevirus, Odonate anphevirus, Orthopteran anphevirus, Shuangao anphevirus, Xincheng anphevirus, Beihai yuyuevirus, Shahe yuyuevirus, Hairy antennavirus, Striated antennavirus, Haartman hartmanivirus, Muikkunen hartmanivirus, Schoolhouse hartmanivirus, Zurich hartmanivirus, Allpahuayo mammarenavirus, Alxa mammarenavirus, Argentinian mammarenavirus, Bear Canyon mammarenavirus, Brazilian mammarenavirus, Cali mammarenavirus, Chapare mammarenavirus, Chevrier mammarenavirus, Cupixi mammarenavirus, Flexal mammarenavirus, Gairo mammarenavirus, Guanarito mammarenavirus, Ippy mammarenavirus, Lassa mammarenavirus, Latino mammarenavirus, Loei River mammarenavirus, Lujo mammarenavirus, Luna mammarenavirus, Lunk mammarenavirus, Lymphocytic choriomeningitis mammarenavirus, Machupo mammarenavirus, Mariental mammarenavirus, Merino Walk mammarenavirus, Mobala mammarenavirus, Mopeia mammarenavirus, Okahandja mammarenavirus, Oliveros mammarenavirus, Paraguayan mammarenavirus, Pirital mammarenavirus, Planalto mammarenavirus, Ryukyu mammarenavirus, Serra do Navio mammarenavirus, Solwezi mammarenavirus, Souris mammarenavirus, Tacaribe mammarenavirus, Tamiami mammarenavirus, Wenzhou mammarenavirus, Whitewater Arroyo mammarenavirus, Xapuri mammarenavirus, California reptarenavirus, Giessen reptarenavirus, Golden reptarenavirus, Ordinary reptarenavirus, Rotterdam reptarenavirus, Crustacean lincruvirus, Actinidia chlorotic ringspot-associated emaravirus, Blackberry leaf mottle associated emaravirus, European mountain ash ringspot-associated emaravirus, Fig mosaic emaravirus, High Plains wheat mosaic emaravirus, Pigeonpea sterility mosaic emaravirus 1, Pigeonpea sterility mosaic emaravirus 2, Pistacia emaravirus B, Raspberry leaf blotch emaravirus, Redbud yellow ringspot-associated emaravirus, Rose rosette emaravirus, Batfish actinovirus, Goosefish actinovirus, Spikefish actinovirus, Hagfish agnathovirus, Brno loanvirus, Longquan loanvirus, Laibin mobatvirus, Nova mobatvirus, Quezon mobatvirus, Andes orthohantavirus, Asama orthohantavirus, Asikkala orthohantavirus, Bayou orthohantavirus, Black Creek Canal orthohantavirus, Bowe orthohantavirus, Bruges orthohantavirus, Cano Delgadito orthohantavirus, Cao Bang orthohantavirus, Choclo orthohantavirus, Dabieshan orthohantavirus, Dobrava-Belgrade orthohantavirus, El Moro Canyon orthohantavirus, Fugong orthohantavirus, Fusong orthohantavirus, Hantaan orthohantavirus, Jeju orthohantavirus, Kenkeme orthohantavirus, Khabarovsk orthohantavirus, Laguna Negra orthohantavirus, Luxi orthohantavirus, Maporal orthohantavirus, Montano orthohantavirus, Necocli orthohantavirus, Oxbow orthohantavirus, Prospect Hill orthohantavirus, Puumala orthohantavirus, Rockport orthohantavirus, Sangassou orthohantavirus, Seewis orhtohantavirus, Seoul orthohantavirus, Sin Nombre orthohantavirus, Thailand orthohantavirus, Tigray orthohantavirus, Tula orthohantavirus, Yakeshi orthohantavirus, Imjin thottimvirus, Thottopalayam thottimvirus, Gecko reptillovirus, Leptomonas shilevirus, Myriapod hubavirus, Artashat orthonairovirus, Chim orthonairovirus, Crimean-Congo hemorrhagic fever orthonairovirus, Dera Ghazi Khan orthonairovirus, Dugbe orthonairovirus, Estero Real orthonairovirus, Hazara orthonairovirus, Hughes orthonairovirus, Kasokero orthonairovirus, Keterah orthonairovirus, Nairobi sheep disease orthonairovirus, Qalyub orthonairovirus, Sakhalin orthonairovirus, Tamdy orthonairovirus, Thiafora orthonairovirus, Spider shaspivirus, Strider striwavirus, Herbert herbevirus, Kibale herbevirus, Tai herbevirus, Acara orthobunyavirus, Aino orthobunyavirus, Akabane orthobunyavirus, Alajuela orthobunyavirus, Anadyr orthobunyavirus, Anhembi orthobunyavirus, Anopheles A orthobunyavirus, Anopheles B orthobunyavirus, Bakau orthobunyavirus, Batai orthobunyavirus, Batama orthobunyavirus, Bellavista orthobunyavirus, Benevides orthobunyavirus, Bertioga orthobunyavirus, Bimiti orthobunyavirus, Birao orthobunyavirus, Botambi orthobunyavirus, Bozo orthobunyavirus, Bunyamwera orthobunyavirus, Bushbush orthobunyavirus, Buttonwillow orthobunyavirus, Bwamba orthobunyavirus, Cache Valley orthobunyavirus, Cachoeira Porteira orthobunyavirus, California encephalitis orthobunyavirus, Capim orthobunyavirus, Caraparu orthobunyavirus, Cat Que orthobunyavirus, Catu orthobunyavirus, Enseada orthobunyavirus, Faceys paddock orthobunyavirus, Fort Sherman orthobunyavirus, Gamboa orthobunyavirus, Guajara orthobunyavirus, Guama orthobunyavirus, Guaroa orthobunyavirus, Iaco orthobunyavirus, Ilesha orthobunyavirus, Ingwavuma orthobunyavirus, Jamestown Canyon orthobunyavirus, Jatobal orthobunyavirus, Kaeng Khoi orthobunyavirus, Kairi orthobunyavirus, Keystone orthobunyavirus, Koongol orthobunyavirus, La Crosse orthobunyavirus, Leanyer orthobunyavirus, Lumbo orthbunyavirus, Macaua orthobunyavirus, Madrid orthobunyavirus, Maguari orthobunyavirus, Main Drain orthobunyavirus, Manzanilla orthobunyavirus, Marituba orthobunyavirus, Melao orthobunyavirus, Mermet orthobunyavirus, Minatitlan orthobunyavirus, MPoko orthobunyavirus, Nyando orthobunyavirus, Olifantsvlei orthobunyavirus, Oriboca orthobunyavirus, Oropouche orthobunyavirus, Patois orthobunyavirus, Peaton orthobunyavirus, Potosi orthobunyavirus, Sabo orthobunyavirus, San Angelo orthobunyavirus, Sango orthobunyavirus, Schmallenberg orthobunyavirus, Serra do Navio orthobunyavirus, Shuni orthobunyavirus, Simbu orthobunyavirus, Snowshoe hare orthobunyavirus, Sororoca orthobunyavirus, Tacaiuma orthobunyavirus, Tahyna orthobunyavirus, Tataguine orthobunyavirus, Tensaw orthobunyavirus, Tete orthobunyavirus, Thimiri orthobunyavirus, Timboteua orthobunyavirus, Trivittatus orthobunyavirus, Turlock orthobunyavirus, Utinga orthobunyavirus, Witwatersrand orthobunyavirus, Wolkberg orthobunyavirus, Wyeomyia orthobunyavirus, Zegla orthobunyavirus, Caimito pacuvirus, Chilibre pacuvirus, Pacui pacuvirus, Rio Preto da Eva pacuvirus, Tapirape pacuvirus, Insect shangavirus, Ferak feravirus, Jonchet jonvirus, Anopheles orthophasmavirus, Culex orthophasmavirus, Ganda orthophasmavirus, Kigluaik phantom orthophasmavirus, Odonate orthophasmavirus, Qingling orthophasmavirus, Wuchang cockroach orthophasmavirus 1, Wuhan mosquito orthophasmavirus 1, Wuhan mosquito orthophasmavirus 2, Sanxia sawastrivirus, Insect wuhivirus, Bhanja bandavirus, Dabie bandavirus, Guertu bandavirus, Heartland bandavirus, Hunter Island bandavirus, Kismaayo bandavirus, Lone Star bandavirus, Dipteran beidivirus, Citrus coguvirus, Coguvirus eburi, Entoleuca entovirus, Cumuto goukovirus, Gouleako goukovirus, Yichang insect goukovirus, Horsefly horwuvirus, Dipteran hudivirus, Lepidopteran hudovirus, Blackleg ixovirus, Norway ixovirus, Scapularis ixovirus, Laurel Lake laulavirus, Lentinula lentinuvirus, Mothra mobuvirus, Badu phasivirus, Dipteran phasivirus, Fly phasivirus, Phasi Charoen-like phasivirus, Wutai mosquito phasivirus, Adana phlebovirus, Aguacate phlebovirus, Alcube phlebovirus, Alenquer phlebovirus, Ambe phlebovirus, Anhanga phlebovirus, Arumowot phlebovirus, Buenaventura phlebovirus, Bujam phlebovirus, Cacao phlebovirus, Campana phlebovirus, Candiru phlebovirus, Chagres phlebovirus, Code phlebovirus, Dashli phlebovirus, Durania phlebovirus, Echarate phlebovirus, Frijoles phlebovirus, Gabek phlebovirus, Gordil phlebovirus, Icoaraci phlebovirus, Itaituba phlebovirus, Itaporanga phlebovirus, Ixcanal phlebovirus, Karimabad phlebovirus, La Gloria phlebovirus, Lara phlebovirus, Leticia phlebovirus, Maldonado phlebovirus, Massilia phlebovirus, Medjerda phlebovirus, Mona Grita phlebovirus, Mukawa phlebovirus, Munguba phlebovirus, Naples phlebovirus, Nique phlebovirus, Ntepes phlebovirus, Odrenisrou phlebovirus, Oriximina phlebovirus, Pena Blanca phlebovirus, Punique phlebovirus, Punta Toro phlebovirus, Rift Valley fever phlebovirus, Rio Grande phlebovirus, Saint Floris phlebovirus, Salanga phlebovirus, Salehabad phlebovirus, Salobo phlabovirus, Sicilian phlebovirus, Tapara phlebovirus, Tehran phlebovirus, Tico phebovirus, Toros phlebovirus, Toscana phlebovirus, Tres Almendras phlebovirus, Turuna phlebovirus, Uriurana phlebovirus, Urucuri phlebovirus, Viola phlebovirus, Zerdali phlebovirus, Pidgey pidchovirus, Apple rubodvirus 1, Apple rubodvirus 2, Echinochloa hoja blanca tenuivirus, Iranian wheat stripe tenuivirus, Maize stripe tenuivirus, Melon tenuivirus, Rice grassy stunt tenuivirus, Rice hoja blanca tenuivirus, Rice stripe tenuivirus, Urochloa hoja blanca tenuivirus, American dog uukuvirus, Dabieshan uukuvirus, Grand Arbaud uukuvirus, Huangpi uukuvirus, Kabuto mountain uukuvirus, Kaisodi uukuvirus, Lihan uukuvirus, Murre uukuvirus, Pacific coast uukuvirus, Precarious Point uukuvirus, Rukutama uukuvirus, Schmidt uukuvirus, Silverwater uukuvirus, Tacheng uukuvirus, Uukuniemi uukuvirus, Yongjia uukuvirus, Zaliv Terpeniya uukuvirus, Shrimp wenrivirus, Alstroemeria necrotic streak orthotospovirus, Alstroemeria yellow spot orthotospovirus, Bean necrotic mosaic orthotospovirus, Calla lily chlorotic spot orthotospovirus, Capsicum chlorosis orthotospovirus, Chrysanthemum stem necrosis orthotospovirus, Groundnut bud necrosis orthotospovirus, Groundnut chlorotic fan spot orthotospovirus, Groundnut ringspot orthotospovirus, Groundnut yellow spot orthotospovirus, Hippeastrum chlorotic ringspot orthotospovirus, Impatiens necrotic spot orthotospovirus, Iris yellow spot orthotospovirus, Melon severe mosaic orthotospovirus, Melon yellow spot orthotospovirus, Mulberry vein banding associated orthotospovirus, Pepper chlorotic spot orthotospovirus, Polygonum ringspot orthotospovirus, Soybean vein necrosis orthotospovirus, Tomato chlorotic spot orthotospovirus, Tomato spotted wilt orthotospovirus, Tomato yellow ring orthotospovirus, Tomato zonate spot orthotospovirus, Watermelon bud necrosis orthotospovirus, Watermelon silver mottle orthotospovirus, Zucchini lethal chlorosis orthotospovirus, Millipede wumivirus, Tilapia tilapinevirus, Influenza A virus, Influenza B virus, Influenza D virus, Influenza C virus, Salmon isavirus, Johnston Atoll quaranjavirus, Quaranfil quaranjavirus, Dhori thogotovirus, Thogoto thogotovirus, Allium cepa amalgavirus 1, Allium cepa amalgavirus 2, Blueberry latent virus, Rhododendron virus A, Southern tomato virus, Spinach amalgavirus 1, Vicia cryptic virus M, Zoostera marina amalgavirus 1, Zoostera marina amalgavirus 2, Zygosaccharomyces bailii virus Z, Cryphonectria hypovirus 1, Cryphonectria hypovirus 2, Cryphonectria hypovirus 3, Cryphonectria hypovirus 4, Beet cryptic virus 1, Carrot cryptic virus, Cherry chlorotic rusty spot associated partitivirus, Chondrostereum purpureum cryptic virus 1, Flammulina velutipes browning virus, Helicobasidium mompa partitivirus V70, Heterobasidion partitivirus 1, Heterobasidion partitivirus 3, Heterobasidion partitivirus 12, Heterobasidion partitivirus 13, Heterobasidion partitivirus 15, Rosellinia necatrix partitivirus 2, Vicia cryptic virus, White clover cryptic virus 1, Atkinsonella hypoxylon virus, Cannabis cryptic virus, Ceratocystis resinifera virus 1, Crimson clover cryptic virus 2, Dill cryptic virus 2, Fusarium poae virus 1, Heterobasidion partitivirus 2, Heterobasidion partitivirus 7, Heterobasidion partitivirus 8, Heterobasidion partitivirus P, Hop trefoil cryptic virus 2, Pleurotus ostreatus virus 1, Primula malacoides virus 1, Red clover cryptic virus 2, Rhizoctonia solani virus 717, Rosellinia necatrix virus 1, White clover cryptic virus 2, Cryptosporidium parvum virus 1, Beet cryptic virus 2, Beet cryptic virus 3, Fig cryptic virus, Pepper cryptic virus 1, Pepper cryptic virus 2, Aspergillus ochraceous virus, Discula destructiva virus 1, Discula destructiva virus 2, Fusarium solani virus 1, Gremmeniella abietina RNA virus MS1, Ophiostoma partitivirus 1, Penicillium stoloniferum virus F, Penicillium stoloniferum virus S, Agaricus bisporus virus 4, Alfalfa cryptic virus 1, Carnation cryptic virus 1, Carrot temperate virus 1, Carrot temperate virus 2, Carrot temperate virus 3, Carrot temperate virus 4, Gaeumannomyces graminis virus 0196A, Gaeumannomyces graminis virus T1A, Hop trefoil cryptic virus 1, Hop trefoil cryptic virus 3, Radish yellow edge virus, Ryegrass cryptic virus, Spinach temperate virus, White clover cryptic virus 3, Beihai picobirnavirus, Equine picobirnavirus, Human picobirnavirus, Aplysia abyssovirus 1, Muarterivirus afrigant, Alphaarterivirus equid, Lambdaarterivirus afriporav, Deltaarterivirus hemfev, Epsilonarterivirus hemcep, Epsilonarterivirus safriver, Epsilonarterivirus zamalb, Etaarterivirus ugarco 1, Iotaarterivirus debrazmo, Iotaarterivirus kibreg 1, Iotaarterivirus pejah, Thetaarterivirus kafuba, Thetaarterivirus mikelba 1, Zetaarterivirus ugarco 1, Betaarterivirus suid 2, Betaarterivirus chinrav 1, Betaarterivirus ninrav, Betaarterivirus sheoin, Betaarterivirus suid 1, Betaarterivirus timiclar, Gammaarterivirus lacdeh, Nuarterivirus guemel, Kappaarterivirus wobum, Chinturpovirus 1, Ptyasnivirus 1, Oligodon snake nidovirus 1, Microhyla letovirus 1, Bat coronavirus CDPHE15, Bat coronavirus HKU10, Rhinolophus ferrumequinum alphacoronavirus HuB-2013, Human coronavirus 229E, Lucheng Rn rat coronavirus, Mink coronavirus 1, Miniopterus bat coronavirus 1, Miniopterus bat coronavirus HKU8, Myotis ricketti alphacoronavirus Sax-2011, Nyctalus velutinus alphacoronavirus SC-2013, Pipistrellus kuhlii coronavirus 3398, Porcine epidemic diarrhea virus, Scotophilus bat coronavirus 512, Rhinolophus bat coronavirus HKU2, Human coronavirus NL63, NL63-related bat coronavirus strain BtKYNL63-9b, Sorex araneus coronavirus T14, Suncus murinus coronavirus X74, Alphacoronavirus 1, Betacoronavirus 1, China Rattus coronavirus HKU24, Human coronavirus HKU1, Murine coronavirus, Myodes coronavirus 2JL14, Bat Hp-betacoronavirus Zhejiang2013, Hedgehog coronavirus 1, Middle East respiratory syndrome-related coronavirus, Pipistrellus bat coronavirus HKU5, Tylonycteris bat coronavirus HKU4, Eidolon bat coronavirus C704, Rousettus bat coronavirus GCCDC1, Rousettus bat coronavirus HKU9, Severe acute respiratory syndrome-related coronavirus, Wigeon coronavirus HKU20, Bulbul coronavirus HKU11, Common moorhen coronavirus HKU21, Coronavirus HKU15, Munia coronavirus HKU13, White-eye coronavirus HKU16, Night heron coronavirus HKU19, Goose coronavirus CB17, Beluga whale coronavirus SW1, Avian coronavirus, Avian coronavirus 9203, Duck coronavirus 2714, Turrinivirus 1, Botrylloides leachii nidovirus, Alphamesonivirus 4, Alphamesonivirus 8, Alphamesonivirus 5, Alphamesonivirus 7, Alphamesonivirus 2, Alphamesonivirus 3, Alphamesonivirus 9, Alphamesonivirus 1, Alphamesonivirus 10, Alphamesonivirus 6, Planidovirus 1, Nangarvirus 1, Halfbeak nidovirus 1, Charybnivirus 1, Decronivirus 1, Paguronivirus 1, Gill-associated virus, Okavirus 1, Yellow head virus, White bream virus, Fathead minnow nidovirus 1, Chinook salmon nidovirus 1, Bovine nidovirus 1, Hebius tobanivirus 1, Infratovirus 1, Lycodon tobanivirus 1, Ball python nidovirus 1, Morelia tobanivirus 1, Berisnavirus 1, Shingleback nidovirus 1, Sectovirus 1, Bovine torovirus, Equine torovirus, Porcine torovirus, Bavaria virus, European brown hare syndrome virus, Rabbit hemorrhagic disease virus, Minovirus A, Nacovirus A, Newbury 1 virus, Norwalk virus, Recovirus A, Nordland virus, Sapporo virus, Saint Valerien virus, Feline calicivirus, Vesicular exanthema of swine virus, Acute bee paralysis virus, Israeli acute paralysis virus, Kashmir bee virus, Mud crab virus, Solenopsis invicta virus 1, Taura syndrome virus, Aphid lethal paralysis virus, Cricket paralysis virus, Drosophila C virus, Rhopalosiphum padi virus, Black queen cell virus, Himetobi P virus, Homalodisca coagulata virus 1, Plautia stali intestine virus, Triatoma virus, Antheraea pernyi iflavirus, Brevicoryne brassicae virus, Deformed wing virus, Dinocampus coccinellae paralysis virus, Ectropis obliqua virus, Infectious flacherie virus, Lygus lineolaris virus 1, Lymantria dispar iflavirus 1, Nilaparvata lugens honeydew virus 1, Perina nuda virus, Sacbrood virus, Slow bee paralysis virus, Spodoptera exigua iflavirus 1, Spodoptera exigua iflavirus 2, Varroa destructor virus 1, Chaetoceros socialis forma radians RNA virus 1, Chaetoceros tenuissimus RNA virus 01, Rhizosolenia setigera RNA virus 01, Astarnavirus, Aurantiochytrium single-stranded RNA virus 01, Jericarnavirus B, Sanfarnavirus 1, Sanfarnavirus 2, Sanfarnavirus 3, Heterosigma akashiwo RNA virus, Britarnavirus 1, Britarnavirus 4, Palmarnavirus 128, Palmarnavirus 473, Britarnavirus 2, Britarnavirus 3, Chaetarnavirus 2, Chaetenuissarnavirus II, Jericarnavirus A, Palmarnavirus 156, Aalivirus A, Ailurivirus A, Ampivirus A, Anativirus A, Anativirus B, Bovine rhinitis A virus, Bovine rhinitis B virus, Equine rhinitis A virus, Foot-and-mouth disease virus, Aquamavirus A, Avihepatovirus A, Avisivirus A, Avisivirus B, Avisivirus C, Boosepivirus A, Boosepivirus B, Boosepivirus C, Bopivirus A, Cardiovirus A, Cardiovirus B, Cardiovirus C, Cardiovirus D, Cardiovirus E, Cardiovirus F, Cosavirus A, Cosavirus B, Cosavirus D, Cosavirus E, Cosavirus F, Crahelivirus A, Crohivirus A, Crohivirus B, Cadicivirus A, Cadicivirus B, Diresapivirus A, Diresapivirus B, Enterovirus A, Enterovirus B, Enterovirus C, Enterovirus D, Enterovirus E, Enterovirus F, Enterovirus G, Enterovirus H, Enterovirus I, Enterovirus J, Enterovirus K, Enterovirus L, Rhinovirus A, Rhinovirus B, Rhinovirus C, Erbovirus A, Felipivirus A, Fipivirus A, Fipivirus B, Fipivirus C, Fipivirus D, Fipivirus E, Gallivirus A, Gruhelivirus A, Grusopivirus A, Grusopivirus B, Harkavirus A, Hemipivirus A, Hepatovirus A, Hepatovirus B, Hepatovirus C, Hepatovirus D, Hepatovirus E, Hepatovirus F, Hepatovirus G, Hepatovirus H, Hepatovirus I, Hunnivirus A, Aichivirus A, Aichivirus B, Aichivirus C, Aichivirus D, Aichivirus E, Aichivirus F, Kunsagivirus A, Kunsagivirus B, Kunsagivirus C, Limnipivirus A, Limnipivirus B, Limnipivirus C, Livupivirus A, Ludopivirus A, Malagasivirus A, Malagasivirus B, Megrivirus A, Megrivirus B, Megrivirus C, Megrivirus D, Megrivirus E, Mischivirus A, Mischivirus B, Mischivirus C, Mischivirus D, Mosavirus A, Mosavirus B, Mupivirus A, Myrropivirus A, Orivirus A, Oscivirus A, Parabovirus A, Parabovirus B, Parabovirus C, Parechovirus A, Parechovirus B, Parechovirus C, Parechovirus D, Parechovirus E, Parechovirus F, Pasivirus A, Passerivirus A, Passerivirus B, Pemapivirus A, Poecivirus A, Potamipivirus A, Potamipivirus B, Rabovirus A, Rabovirus B, Rabovirus C, Rabovirus D, Rafivirus A, Rafivirus B, Rafivirus C, Rohelivirus A, Rosavirus A, Rosavirus B, Rosavirus C, Sakobuvirus A, Salivirus A, Sapelovirus A, Sapelovirus B, Senecavirus A, Shanbavirus A, Sicinivirus A, Symapivirus A, Teschovirus A, Teschovirus B, Torchivirus A, Tottorivirus A, Tremovirus A, Tremovirus B, Tropivirus A, Chironomus riparius virus 1, Hubei chipolycivirus, Hubei hupolycivirus, Formica exsecta virus 3, Lasius neglectus virus 1, Lasius neglectus virus 2, Lasius niger virus 1, Linepithema humile virus 2, Monomorium pharaonis virus 1, Monomorium pharaonis virus 2, Myrmica scabrinodis virus 1, Shuangao insect virus 8, Solenopsis invicta virus 2, Solenopsis invicta virus 4, Andean potato mottle virus, Bean pod mottle virus, Bean rugose mosaic virus, Broad bean stain virus, Broad bean true mosaic virus, Cowpea mosaic virus, Cowpea severe mosaic virus, Glycine mosaic virus, Pea green mottle virus, Pea mild mosaic virus, Quail pea mosaic virus, Radish mosaic virus, Red clover mottle virus, Squash mosaic virus, Ullucus virus C, Broad bean wilt virus 1, Broad bean wilt virus 2, Cucurbit mild mosaic virus, Gentian mosaic virus, Grapevine fabavirus, Lamium mild mosaic virus, Prunus virus F, Aeonium ringspot virus, Apricot latent ringspot virus, Arabis mosaic virus, Arracacha virus A, Artichoke Aegean ringspot virus, Artichoke Italian latent virus, Artichoke yellow ringspot virus, Beet ringspot virus, Blackcurrant reversion virus, Blueberry latent spherical virus, Blueberry leaf mottle virus, Cassava American latent virus, Cassava green mottle virus, Cherry leaf roll virus, Chicory yellow mottle virus, Cocoa necrosis virus, Crimson clover latent virus, Cycas necrotic stunt virus, Grapevine Anatolian ringspot virus, Grapevine Bulgarian latent virus, Grapevine chrome mosaic virus, Grapevine deformation virus, Grapevine fanleaf virus, Grapevine Tunisian ringspot virus, Hibiscus latent ringspot virus, Lucerne Australian latent virus, Melon mild mottle virus, Mulberry mosaic leaf roll associated virus, Mulberry ringspot virus, Myrobalan latent ringspot virus, Olive latent ringspot virus, Peach rosette mosaic virus, Potato black ringspot virus, Potato virus B, Potato virus U, Raspberry ringspot virus, Soybean latent spherical virus, Tobacco ringspot virus, Tomato black ring virus, Tomato ringspot virus, Apple latent spherical virus, Arracacha virus B, Cherry rasp leaf virus, Currant latent virus, Stocky prune virus, Chocolate lily virus A, Dioscorea mosaic associated virus, Satsuma dwarf virus, Black raspberry necrosis virus, Strawberry mottle virus, Carrot necrotic dieback virus, Dandelion yellow mosaic virus, Parsnip yellow fleck virus, Carrot torradovirus 1, Lettuce necrotic leaf curl virus, Motherwort yellow mottle virus, Squash chlorotic leaf spot virus, Tomato marchitez virus, Tomato torrado virus, Anthriscus yellows virus, Bellflower vein chlorosis virus, Maize chlorotic dwarf virus, Rice tungro spherical virus, Strawberry latent ringspot virus, Solenopsis invicta virus 3, Nylanderia fulva virus 1, Heterocapsa circularisquama RNA virus 01, Mushroom bacilliform virus, Poinsettia latent virus, Artemisia virus A, Blueberry shoestring virus, Cocksfoot mottle virus, Cymbidium chlorotic mosaic virus, Imperata yellow mottle virus, Lucerne transient streak virus, Papaya lethal yellowing virus, Rice yellow mottle virus, Rottboellia yellow mottle virus, Ryegrass mottle virus, Sesbania mosaic virus, Solanum nodiflorum mottle virus, Southern bean mosaic virus, Southern cowpea mosaic virus, Sowbane mosaic virus, Soybean yellow common mosaic virus, Subterranean clover mottle virus, Turnip rosette virus, Velvet tobacco mottle virus, Areca palm necrotic ringspot virus, Areca palm necrotic spindle-spot virus, Bellflower veinal mottle virus, Blackberry virus Y, Barley mild mosaic virus, Barley yellow mosaic virus, Oat mosaic virus, Rice necrosis mosaic virus, Wheat spindle streak mosaic virus, Wheat yellow mosaic virus, Celery latent virus, Cassava brown streak virus, Coccinia mottle virus, Cucumber vein yellowing virus, Squash vein yellowing virus, Sweet potato mild mottle virus, Tomato mild mottle virus, Ugandan cassava brown streak virus, Alpinia mosaic virus, Alpinia oxyphylla mosaic virus, Artichoke latent virus, Broad-leafed dock virus A, Cardamom mosaic virus, Chinese yam necrotic mosaic virus, Maclura mosaic virus, Narcissus latent virus, Yam chlorotic mosaic virus, Yam chlorotic necrosis virus, Caladenia virus A, Sugarcane streak mosaic virus, Triticum mosaic virus, African eggplant mosaic virus, Algerian watermelon mosaic virus, Alstroemeria mosaic virus, Alternanthera mild mosaic virus, Amaranthus leaf mottle virus, Amazon lily mosaic virus, Angelica virus Y, Apium virus Y, Araujia mosaic virus, Arracacha mottle virus, Asparagus virus 1, Banana bract mosaic virus, Barbacena virus Y, Basella rugose mosaic virus, Bean common mosaic necrosis virus, Bean common mosaic virus, Bean yellow mosaic virus, Beet mosaic virus, Bidens mosaic virus, Bidens mottle virus, Blue squill virus A, Brugmansia mosaic virus, Brugmansia suaveolens mottle virus, Butterfly flower mosaic virus, Calanthe mild mosaic virus, Calla lily latent virus, Callistephus mottle virus, Canna yellow streak virus, Carnation vein mottle virus, Carrot thin leaf virus, Carrot virus Y, Catharanthus mosaic virus, Celery mosaic virus, Ceratobium mosaic virus, Chilli ringspot virus, Chilli veinal mottle virus, Chinese artichoke mosaic virus, Clitoria virus Y, Clover yellow vein virus, Cocksfoot streak virus, Colombian datura virus, Commelina mosaic virus, Cowpea aphid-borne mosaic virus, Cucurbit vein banding virus, Cypripedium virus Y, Cyrtanthus elatus virus A, Daphne mosaic virus, Daphne virus Y, Dasheen mosaic virus, Datura shoestring virus, Dendrobium chlorotic mosaic virus, Dioscorea mosaic virus, Diuris virus Y, Donkey orchid virus A, East Asian Passiflora distortion virus, East Asian Passiflora virus, Endive necrotic mosaic virus, Euphorbia ringspot virus, Freesia mosaic virus, Fritillary virus Y, Gloriosa stripe mosaic virus, Gomphocarpus mosaic virus, Habenaria mosaic virus, Hardenbergia mosaic virus, Henbane mosaic virus, Hibbertia virus Y, Hippeastrum mosaic virus, Hyacinth mosaic virus, Impatiens flower break virus, Iris fulva mosaic virus, Iris mild mosaic virus, Iris severe mosaic virus, Japanese yam mosaic virus, Jasmine virus T, Johnsongrass mosaic virus, Kalanchoe mosaic virus, Keunjorong mosaic virus, Konjac mosaic virus, Leek yellow stripe virus, Lettuce Italian necrotic virus, Lettuce mosaic virus, Lily mottle virus, Lily virus Y, Lupinus mosaic virus, Lycoris mild mottle virus, Maize dwarf mosaic virus, Malva vein clearing virus, Mashua virus Y, Meadow saffron breaking virus, Mediterranean ruda virus, Moroccan watermelon mosaic virus, Narcissus degeneration virus, Narcissus late season yellows virus, Narcissus yellow stripe virus, Nerine yellow stripe virus, Nothoscordum mosaic virus, Onion yellow dwarf virus, Ornithogalum mosaic virus, Ornithogalum virus 2, Ornithogalum virus 3, Panax virus Y, Papaya leaf distortion mosaic virus, Papaya ringspot virus, Paris mosaic necrosis virus, Parsnip mosaic virus, Passiflora chlorosis virus, Passion fruit woodiness virus, Pea seed-borne mosaic virus, Peanut mottle virus, Pecan mosaic-associated virus, Pennisetum mosaic virus, Pepper mottle virus, Pepper severe mosaic virus, Pepper veinal mottle virus, Pepper yellow mosaic virus, Peru tomato mosaic virus, Pfaffia mosaic virus, Platycodon mild mottle virus, Pleione virus Y, Plum pox virus, Pokeweed mosaic virus, Potato virus A, Potato virus V, Potato virus Y, Potato yellow blotch virus, Ranunculus leaf distortion virus, Ranunculus mild mosaic virus, Ranunculus mosaic virus, Rhopalanthe virus Y, Saffron latent virus, Sarcochilus virus Y, Scallion mosaic virus, Shallot yellow stripe virus, Sorghum mosaic virus, Soybean mosaic virus, Spiranthes mosaic virus 3, Sudan watermelon mosaic virus, Sugarcane mosaic virus, Sunflower chlorotic mottle virus, Sunflower mild mosaic virus, Sunflower mosaic virus, Sunflower ring blotch virus, Sweet potato feathery mottle virus, Sweet potato latent virus, Sweet potato mild speckling virus, Sweet potato virus 2, Sweet potato virus C, Sweet potato virus G, Tamarillo leaf malformation virus, Telfairia mosaic virus, Telosma mosaic virus, Thunberg fritillary mosaic virus, Tobacco etch virus, Tobacco mosqueado virus, Tobacco vein banding mosaic virus, Tobacco vein mottling virus, Tomato necrotic stunt virus, Tradescantia mild mosaic virus, Tuberose mild mosaic virus, Tuberose mild mottle virus, Tulip breaking virus, Tulip mosaic virus, Turnip mosaic virus, Twisted-stalk chlorotic streak virus, Vallota mosaic virus, Vanilla distortion mosaic virus, Verbena virus Y, Watermelon leaf mottle virus, Watermelon mosaic virus, Wild melon banding virus, Wild onion symptomless virus, Wild potato mosaic virus, Wild tomato mosaic virus, Wisteria vein mosaic virus, Yam mild mosaic virus, Yam mosaic virus, Yambean mosaic virus, Zantedeschia mild mosaic virus, Zea mosaic virus, Zucchini shoestring virus, Zucchini tigre mosaic virus, Zucchini yellow fleck virus, Zucchini yellow mosaic virus, Passiflora edulis symptomless virus, Rose yellow mosaic virus, Agropyron mosaic virus, Hordeum mosaic virus, Ryegrass mosaic virus, Brome streak mosaic virus, Oat necrotic mottle virus, Tall oatgrass mosaic virus, Wheat eqlid mosaic virus, Wheat streak mosaic virus, Yellow oat grass mosaic virus, Common reed chlorotic stripe virus, Longan witches broom-associated virus, Spartina mottle virus, Avastrovirus 1, Avastrovirus 2, Avastrovirus 3, Mamastrovirus 1, Mamastrovirus 2, Mamastrovirus 3, Mamastrovirus 4, Mamastrovirus 5, Mamastrovirus 6, Mamastrovirus 7, Mamastrovirus 8, Mamastrovirus 9, Mamastrovirus 10, Mamastrovirus 11, Mamastrovirus 12, Mamastrovirus 13, Mamastrovirus 14, Mamastrovirus 15, Mamastrovirus 16, Mamastrovirus 17, Mamastrovirus 18, Mamastrovirus 19, Infectious pancreatic necrosis virus, Tellina virus, Yellowtail ascites virus, Infectious bursal disease virus, Blotched snakehead virus, Lates calcarifer birnavirus, Drosophina B birnavirus, Drosophila X virus, Mosquito X virus, Rotifer birnavirus, Tellina virus 1, Euprosterna elaeasa virus, Thosea asigna virus, Botrytis porri botybirnavirus 1, Duck hepatitis B virus, Heron hepatitis B virus, Parrot hepatitis B virus, Tibetan frog hepatitis B virus, Blue gill hepatitis B virus, Capuchin monkey hepatitis B virus, Chinese shrew hepatitis B virus, Domestic cat hepatitis B virus, Ground squirrel hepatitis virus, Hepatitis B virus, Long-fingered bat hepatitis B virus, Pomona bat hepatitis B virus, Roundleaf bat hepatitis B virus, Tai Forest hepatitis B virus, Tent-making bat hepatitis B virus, Woodchuck hepatitis virus, Woolly monkey hepatitis B virus, White sucker hepatitis B virus, Anopheles gambiae Moose virus, Antheraea semotivirus Tamy, Ascaris lumbricoides Tas virus, Bombyx mori Pao virus, Caenorhabditis elegans Cer13 virus, Drosophila melanogaster Bel virus, Drosophila melanogaster Roo virus, Drosophila semotivirus Max, Drosophila simulans Ninja virus, Schistosoma semotivirus Sinbad, Takifugu rubripes Suzu virus, Aglaonema bacilliform virus, Banana streak GF virus, Banana streak IM virus, Banana streak MY virus, Banana streak OL virus, Banana streak UA virus, Banana streak UI virus, Banana streak UL virus, Banana streak UM virus, Banana streak VN virus, Birch leaf roll-associated virus, Blackberry virus F, Bougainvillea chlorotic vein banding virus, Cacao bacilliform Sri Lanka virus, Cacao mild mosaic virus, Cacao swollen shoot CD virus, Cacao swollen shoot CE virus, Cacao swollen shoot Ghana M virus, Cacao swollen shoot Ghana N virus, Cacao swollen shoot Ghana Q virus, Cacao swollen shoot Togo A virus, Cacao swollen shoot Togo B virus, Cacao yellow vein banding virus, Canna yellow mottle associated virus, Canna yellow mottle virus, Citrus yellow mosaic virus, Codonopsis vein clearing virus, Commelina yellow mottle virus, Dioscorea bacilliform AL virus, Dioscorea bacilliform AL virus 2, Dioscorea bacilliform ES virus, Dioscorea bacilliform RT virus 1, Dioscorea bacilliform RT virus 2, Dioscorea bacilliform SN virus, Dioscorea bacilliform TR virus, Fig badnavirus 1, Gooseberry vein banding associated virus, Grapevine badnavirus 1, Grapevine Roditis leaf discoloration-associated virus, Grapevine vein clearing virus, Jujube mosaic-associated virus, Kalanchoe top-spotting virus, Mulberry badnavirus 1, Pagoda yellow mosaic associated virus, Pineapple bacilliform CO virus, Pineapple bacilliform ER virus, Piper yellow mottle virus, Rubus yellow net virus, Schefflera ringspot virus, Spiraea yellow leafspot virus, Sugarcane bacilliform Guadeloupe A virus, Sugarcane bacilliform Guadeloupe D virus, Sugarcane bacilliform IM virus, Sugarcane bacilliform MO virus, Sweet potato pakakuy virus, Taro bacilliform CH virus, Taro bacilliform virus, Wisteria badnavirus 1, Yacon necrotic mottle virus, Angelica bushy stunt virus, Atractylodes mild mottle virus, Carnation etched ring virus, Cauliflower mosaic virus, Dahlia mosaic virus, Figwort mosaic virus, Horseradish latent virus, Lamium leaf distortion virus, Mirabilis mosaic virus, Rudbeckia flower distortion virus, Soybean Putnam virus, Strawberry vein banding virus, Thistle mottle virus, Cassava vein mosaic virus, Sweet potato collusive virus, Dioscorea nummularia associated virus, Petunia vein clearing virus, Rose yellow vein virus, Sweet potato vein clearing virus, Tobacco vein clearing virus, Blueberry red ringspot virus, Cestrum yellow leaf curling virus, Peanut chlorotic streak virus, Soybean chlorotic mottle virus, Rice tungro bacilliform virus, Blueberry fruit drop associated virus, Ceratitis capitata Yoyo virus, Drosophila ananassae Tom virus, Drosophila melanogaster 17-6 virus, Drosophila melanogaster 297 virus, Drosophila melanogaster Gypsy virus, Drosophila melanogaster Idefix virus, Drosophila melanogaster Tirant virus, Drosophila melanogaster Zam virus, Drosophila virilis Tv1 virus, Trichoplusia ni TED virus, Arabidopsis thaliana Athila virus, Arabidopsis thaliana Tat4 virus, Bombyx mori Mag virus, Caenorhabditis elegans Cerl virus, Cladosporium fulvum T-1 virus, Dictyostelium discoideum Skipper virus, Drosophila buzzatii Osvaldo virus, Drosophila melanogaster 412 virus, Drosophila melanogaster Blastopia virus, Drosophila melanogaster Mdg1 virus, Drosophila melanogaster Mdg3 virus, Drosophila melanogaster Micropia virus, Drosophila virilis Ulysses virus, Fusarium oxysporum Skippy virus, Lilium henryi Dell virus, Saccharomyces cerevisiae Ty3 virus, Schizosaccharomyces pombe Tf1 virus, Schizosaccharomyces pombe Tf2 virus, Takifugu rubripes Sushi virus, Tribolium castaneum Woot virus, Tripneustis gratilla SURL virus, Aedes aegypti Mosqcopia virus, Candida albicans Tca2 virus, Candida albicans Tca5 virus, Drosophila melanogaster 1731 virus, Drosophila melanogaster copia virus, Saccharomyces cerevisiae Ty5 virus, Volvox carteri Lueckenbuesser virus, Volvox carteri Osser virus, Arabidopsis thaliana Art1 virus, Arabidopsis thaliana AtRE1 virus, Arabidopsis thaliana evelknievel virus, Arabidopsis thaliana Tal virus, Brassica oleracea Melmoth virus, Cajanus cajan Panzee virus, Glycine max Tgmr virus, Hordeum vulgare BARE-1 virus, Nicotiana tabacum Tnt1 virus, Nicotiana tabacum Tto1 virus, Oryza australiensis RIRE1 virus, Oryza longistaminata Retrofit virus, Physarum polycephalum Tp1 virus, Saccharomyces cerevisiae Ty1 virus, Saccharomyces cerevisiae Ty2 virus, Saccharomyces cerevisiae Ty4 virus, Solanum tuberosum Tst1 virus, Triticum aestivum WIS2 virus, Zea mays Hopscotch virus, Zea mays Sto4 virus, Arabidopsis thaliana Endovir virus, Glycine max SIRE1 virus, Lycopersicon esculentum ToRTL1 virus, Zea mays Opie2 virus, Zea mays Prem2 virus, Phaseolus vulgaris Tpv2-6 virus, Avian carcinoma Mill Hill virus 2, Avian leukosis virus, Avian myeloblastosis virus, Avian myelocytomatosis virus 29, Avian sarcoma virus CT10, Fujinami sarcoma virus, Rous sarcoma virus, UR2 sarcoma virus, Y73 sarcoma virus, Jaagsiekte sheep retrovirus, Langur virus, Mason-Pfizer monkey virus, Mouse mammary tumor virus, Squirrel monkey retrovirus, Bovine leukemia virus, Primate T-lymphotropic virus 1, Primate T-lymphotropic virus 2, Primate T-lymphotropic virus 3, Walleye dermal sarcoma virus, Walleye epidermal hyperplasia virus 1, Walleye epidermal hyperplasia virus 2, Chick syncytial virus, Feline leukemia virus, Finkel-Biskis-Jinkins murine sarcoma virus, Gardner-Arnstein feline sarcoma virus, Gibbon ape leukemia virus, Guinea pig type-C oncovirus, Hardy-Zuckerman feline sarcoma virus, Harvey murine sarcoma virus, Kirsten murine sarcoma virus, Koala retrovirus, Moloney murine sarcoma virus, Murine leukemia virus, Porcine type-C oncovirus, Reticuloendotheliosis virus, Snyder-Theilen feline sarcoma virus, Trager duck spleen necrosis virus, Viper retrovirus, Woolly monkey sarcoma virus, Bovine immunodeficiency virus, Caprine arthritis encephalitis virus, Equine infectious anemia virus, Feline immunodeficiency virus, Human immunodeficiency virus 1, Human immunodeficiency virus 2, Jembrana disease virus, Puma lentivirus, Simian immunodeficiency virus, Visna-maedi virus, Bovine foamy virus, Equine foamy virus, Feline foamy virus, Brown greater galago prosimian foamy virus, Bornean orangutan simian foamy virus, Central chimpanzee simian foamy virus, Cynomolgus macaque simian foamy virus, Eastern chimpanzee simian foamy virus, Grivet simian foamy virus, Guenon simian foamy virus, Japanese macaque simian foamy virus, Rhesus macaque simian foamy virus, Spider monkey simian foamy virus, Squirrel monkey simian foamy virus, Taiwanese macaque simian foamy virus, Western chimpanzee simian foamy virus, Western lowland gorilla simian foamy virus, White-tufted-ear marmoset simian foamy virus, Yellow-breasted capuchin simian foamy virus, Aspergillus fumigatus polymycovirus 1, Aspergillus spelaeus polymycovirus 1, Beauveria bassiana polymycovirus 1, Botryoshaeria dothidea polymycovirus 1, Cladosporium cladosporioides polymycovirus 1, Colletotrichum camelliae polymycovirus 1, Fusarium redolens polymycovirus 1, Magnaporthe oryzae polymycovirus 1, Penicillium digitatum polymycovirus 1, Penicillum brevicompactum polymycovirus 1, Macrobrachium satellite virus 1, Tobacco albetovirus 1, Tobacco albetovirus 2, Tobacco albetovirus 3, Maize aumaivirus 1, Panicum papanivirus 1, Tobacco virtovirus 1, Acanthocystis turfacea chlorella virus 1, Hydra viridis Chlorella virus 1, Paramecium bursaria Chlorella virus 1, Paramecium bursaria Chlorella virus A1, Paramecium bursaria Chlorella virus AL1A, Paramecium bursaria Chlorella virus AL2A, Paramecium bursaria Chlorella virus BJ2C, Paramecium bursaria Chlorella virus CA4A, Paramecium bursaria Chlorella virus CA4B, Paramecium bursaria Chlorella virus IL3A, Paramecium bursaria Chlorella virus NC1A, Paramecium bursaria Chlorella virus NE8A, Paramecium bursaria Chlorella virus NY2A, Paramecium bursaria Chlorella virus NYs1, Paramecium bursaria Chlorella virus SC1A, Paramecium bursaria Chlorella virus XY6E, Paramecium bursaria Chlorella virus XZ3A, Paramecium bursaria Chlorella virus XZ4A, Paramecium bursaria Chlorella virus XZ4C, Emiliania huxleyi virus 86, Ectocarpus fasciculatus virus a, Ectocarpus siliculosus virus 1, Ectocarpus siliculosus virus a, Feldmannia irregularis virus a, Feldmannia species virus, Feldmannia species virus a, Hincksia hinckiae virus a, Myriotrichia clavaeformis virus a, Pilayella littoralis virus 1, Micromonas pusilla virus SP1, Ostreococcus tauri virus OtV5, Chrysochromulina brevifilum virus PW1, Heterosigma akashiwo virus 01, Cafeteria roenbergensis virus, Acanthamoeba polyphaga mimivirus, Heliothis virescens ascovirus 3a, Spodoptera frugiperda ascovirus 1a, Trichoplusia ni ascovirus 2a, Diadromus pulchellus toursvirus, Lymphocystis disease virus 1, Lymphocystis disease virus 2, Lymphocystis disease virus 3, Infectious spleen and kidney necrosis virus, Scale drop disease virus, Ambystoma tigrinum virus, Common midwife toad virus, Epizootic haematopoietic necrosis virus, Frog virus 3, Santee-Cooper ranavirus, Singapore grouper iridovirus, Anopheles minimus iridovirus, Invertebrate iridescent virus 3, Invertebrate iridescent virus 9, Invertebrate iridescent virus 22, Invertebrate iridescent virus 25, Decapod iridescent virus 1, Invertebrate iridescent virus 6, Invertebrate iridescent virus 31, Marseillevirus marseillevirus, Senegalvirus marseillevirus, Lausannevirus, Tunisvirus, African swine fever virus, Canarypox virus, Flamingopox virus, Fowlpox virus, Juncopox virus, Mynahpox virus, Penguinpox virus, Pigeonpox virus, Psittacinepox virus, Quailpox virus, Sparrowpox virus, Starlingpox virus, Turkeypox virus, Goatpox virus, Lumpy skin disease virus, Sheeppox virus, Murmansk microtuspox virus, Yokapox virus, Mule deerpox virus, Nile crocodilepox virus, Hare fibroma virus, Myxoma virus, Rabbit fibroma virus, Squirrel fibroma virus, Eastern kangaroopox virus, Western kangaroopox virus, Molluscum contagiosum virus, Sea otterpox virus, Abatino macacapox virus, Akhmeta virus, Camelpox virus, Cowpox virus, Ectromelia virus, Monkeypox virus, Raccoonpox virus, Skunkpox virus, Taterapox virus, Vaccinia virus, Variola virus, Volepox virus, Cotia virus, Bovine papular stomatitis virus, Grey sealpox virus, Orf virus, Pseudocowpox virus, Red deerpox virus, Pteropox virus, Salmon gillpox virus, Squirrelpox virus, Swinepox virus, Eptesipox virus, Tanapox virus, Yaba monkey tumor virus, Anomala cuprea entomopoxvirus, Aphodius tasmaniae entomopoxvirus, Demodema bonariensis entomopoxvirus, Dermolepida albohirtum entomopoxvirus, Figulus sublaevis entomopoxvirus, Geotrupes sylvaticus entomopoxvirus, Melolontha melolontha entomopoxvirus, Acrobasis zelleri entomopoxvirus, Adoxophyes honmai entomopoxvirus, Amsacta moorei entomopoxvirus, Arphia conspersa entomopoxvirus, Choristoneura biennis entomopoxvirus, Choristoneura conflicta entomopoxvirus, Choristoneura diversuma entomopoxvirus, Choristoneura fumiferana entomopoxvirus, Choristoneura rosaceana entomopoxvirus, Chorizagrotis auxiliaris entomopoxvirus, Heliothis armigera entomopoxvirus, Locusta migratoria entomopoxvirus, Mythimna separata entomopoxvirus, Oedaleus senegalensis entomopoxvirus, Operophtera brumata entomopoxvirus, Schistocerca gregaria entomopoxvirus, Melanoplus sanguinipes entomopoxvirus, Aedes aegypti entomopoxvirus, Camptochironomus tentans entomopoxvirus, Chironomus attenuatus entomopoxvirus, Chironomus luridus entomopoxvirus, Chironomus plumosus entomopoxvirus, Goeldichironomus holoprasinus entomopoxvirus, Diachasmimorpha entomopoxvirus, Cafeteriavirus-dependent mavirus, Mimivirus-dependent virus Sputnik, Mimivirus-dependent virus Zamilon, Sulfolobus turreted icosahedral virus 1, Sulfolobus turreted icosahedral virus 2, Pseudomonas virus PR4, Pseudomonas virus PRD1, Bacillus virus AP50, Bacillus virus Bam35, Bacillus virus GIL16, Bacillus virus Wip1, Gluconobacter virus GC1, Bovine atadenovirus D, Deer atadenovirus A, Duck atadenovirus A, Lizard atadenovirus A, Ovine atadenovirus D, Possum atadenovirus A, Psittacine atadenovirus A, Snake atadenovirus A, Duck aviadenovirus B, Falcon aviadenovirus A, Fowl aviadenovirus A, Fowl aviadenovirus B, Fowl aviadenovirus C, Fowl aviadenovirus D, Fowl aviadenovirus E, Goose aviadenovirus A, Pigeon aviadenovirus A, Pigeon aviadenovirus B, Psittacine aviadenovirus B, Psittacine aviadenovirus C, Turkey aviadenovirus B, Turkey aviadenovirus C, Turkey aviadenovirus D, Sturgeon ichtadenovirus A, Bat mastadenovirus A, Bat mastadenovirus B, Bat mastadenovirus C, Bat mastadenovirus D, Bat mastadenovirus E, Bat mastadenovirus F, Bat mastadenovirus G, Bat mastadenovirus H, Bat mastadenovirus I, Bat mastadenovirus J, Bovine mastadenovirus A, Bovine mastadenovirus B, Bovine mastadenovirus C, Canine mastadenovirus A, Deer mastadenovirus B, Dolphin mastadenovirus A, Dolphin mastadenovirus B, Equine mastadenovirus A, Equine mastadenovirus B, Human mastadenovirus A, Human mastadenovirus B, Human mastadenovirus C, Human mastadenovirus D, Human mastadenovirus E, Human mastadenovirus F, Human mastadenovirus G, Murine mastadenovirus A, Murine mastadenovirus B, Murine mastadenovirus C, Ovine mastadenovirus A, Ovine mastadenovirus B, Ovine mastadenovirus C, Platyrrhini mastadenovirus A, Polar bear mastadenovirus A, Porcine mastadenovirus A, Porcine mastadenovirus B, Porcine mastadenovirus C, Sea lion mastadenovirus A, Simian mastadenovirus A, Simian mastadenovirus B, Simian mastadenovirus C, Simian mastadenovirus D, Simian mastadenovirus E, Simian mastadenovirus F, Simian mastadenovirus G, Simian mastadenovirus H, Simian mastadenovirus I, Skunk mastadenovirus A, Squirrel mastadenovirus A, Tree shrew mastadenovirus A, Frog siadenovirus A, Great tit siadenovirus A, Penguin siadenovirus A, Raptor siadenovirus A, Skua siadenovirus A, Turkey siadenovirus A, Pseudoalteromonas virus Cr39582, Pseudoalteromonas virus PM2, Haloarcula hispanica icosahedral virus 2, Haloarcula hispanica virus PH1, Haloarcula hispanica virus SH1, Haloarcula virus HCIV1, Natrinema virus SNJ1, Thermus virus IN93, Thermus virus P23-77, Alphalipothrixvirus SBFV2, Alphalipothrixvirus SFV1, Acidianus filamentous virus 3, Acidianus filamentous virus 6, Acidianus filamentous virus 7, Acidianus filamentous virus 8, Acidianus filamentous virus 9, Sulfolobus islandicus filamentous virus, Acidianus filamentous virus 2, Deltalipothrixvirus SBFV3, Acidianus filamentous virus 1, Acidianus rod-shaped virus 1, Sulfolobus islandicus rod-shaped virus 1, Sulfolobus islandicus rod-shaped virus 2, Ageratum yellow vein Singapore alphasatellite, Cotton leaf curl Saudi Arabia alphasatellite, Ash gourd yellow vein mosaic alphasatellite, Capsicum India alphasatellite, Cleome leaf crumple alphasatellite, Croton yellow vein mosaic alphasatellite, Euphorbia yellow mosaic alphasatellite, Melon chlorotic mosaic alphasatellite, Sida Cuba alphasatellite, Tomato leaf curl New Delhi alphasatellite, Tomato leaf curl Virudhunagar alphasatellite, Tomato yellow spot alphasatellite, Whitefly associated Guatemala alphasatellite 2, Whitefly associated Puerto Rico alphasatellite 1, Ageratum enation alphasatellite, Ageratum yellow vein alphasatellite, Ageratum yellow vein China alphasatellite, Ageratum yellow vein India alphasatellite, Bhendi yellow vein alphasatellite, Cassava mosaic Madagascar alphasatellite, Chilli leaf curl alphasatellite, Cotton leaf curl Egypt alphasatellite, Cotton leaf curl Gezira alphasatellite, Cotton leaf curl Lucknow alphasatellite, Cotton leaf curl Multan alphasatellite, Gossypium darwinii symptomless alphasatellite, Malvastrum yellow mosaic alphasatellite, Malvastrum yellow mosaic Cameroon alphasatellite, Pedilanthus leaf curl alphasatellite, Sida leaf curl alphasatellite, Sida yellow vein Vietnam alphasatellite, Sunflower leaf curl Karnataka alphasatellite, Synedrella leaf curl alphasatellite, Tobacco curly shoot alphasatellite, Tomato leaf curl Buea alphasatellite, Tomato leaf curl Cameroon alphasatellite, Tomato leaf curl Pakistan alphasatellite, Tomato yellow leaf curl China alphasatellite, Tomato yellow leaf curl Thailand alphasatellite, Tomato yellow leaf curl Yunnan alphasatellite, Eclipta yellow vein alphasatellite, Gossypium mustelinum symptomless alphasatellite, Hollyhock yellow vein alphasatellite, Mesta yellow vein mosaic alphasatellite, Okra enation leaf curl alphasatellite, Okra yellow crinkle Cameroon alphasatellite, Vernonia yellow vein Fujian alphasatellite, Dragonfly associated alphasatellite, Whitefly associated Guatemala alphasatellite 1, Banana bunchy top alphasatellite 1, Banana bunchy top alphasatellite 2, Banana bunchy top alphasatellite 3, Cardamom bushy dwarf alphasatellite, Milk vetch dwarf alphasatellite 2, Pea necrotic yellow dwarf alphasatellite 2, Sophora yellow stunt alphasatellite 4, Sophora yellow stunt alphasatellite 5, Subterranean clover stunt alphasatellite 2, Faba bean necrotic yellows alphasatellite 2, Milk vetch dwarf alphasatellite 3, Faba bean necrotic stunt alphasatellite, Milk vetch dwarf alphasatellite 1, Pea necrotic yellow dwarf alphasatellite 1, Sophora yellow stunt alphasatellite 2, Cow vetch latent alphasatellite, Sophora yellow stunt alphasatellite 3, Faba bean necrotic yellows alphasatellite 1, Faba bean necrotic yellows alphasatellite 3, Sophora yellow stunt alphasatellite 1, Subterranean clover stunt alphasatellite 1, Coconut foliar decay alphasatellite, Acidianus bottle-shaped virus, Torque teno virus 1, Torque teno virus 2, Torque teno virus 3, Torque teno virus 4, Torque teno virus 5, Torque teno virus 6, Torque teno virus 7, Torque teno virus 8, Torque teno virus 9, Torque teno virus 10, Torque teno virus 11, Torque teno virus 12, Torque teno virus 13, Torque teno virus 14, Torque teno virus 15, Torque teno virus 16, Torque teno virus 17, Torque teno virus 18, Torque teno virus 19, Torque teno virus 20, Torque teno virus 21, Torque teno virus 22, Torque teno virus 23, Torque teno virus 24, Torque teno virus 25, Torque teno virus 26, Torque teno virus 27, Torque teno virus 28, Torque teno virus 29, Torque teno mini virus 1, Torque teno mini virus 2, Torque teno mini virus 3, Torque teno mini virus 4, Torque teno mini virus 5, Torque teno mini virus 6, Torque teno mini virus 7, Torque teno mini virus 8, Torque teno mini virus 9, Torque teno mini virus 10, Torque teno mini virus 11, Torque teno mini virus 12, Torque teno tupaia virus, Torque teno tamarin virus, Torque teno felis virus, Torque teno felis virus 2, Torque teno midi virus 1, Torque teno midi virus 2, Torque teno midi virus 3, Torque teno midi virus 4, Torque teno midi virus 5, Torque teno midi virus 6, Torque teno midi virus 7, Torque teno midi virus 8, Torque teno midi virus 9, Torque teno midi virus 10, Torque teno midi virus 11, Torque teno midi virus 12, Torque teno midi virus 13, Torque teno midi virus 14, Torque teno midi virus 15, Chicken anemia virus, Torque teno sus virus 1a, Torque teno sus virus 1b, Torque teno sus virus k2a, Torque teno sus virus k2b, Torque teno seal virus 1, Torque teno seal virus 2, Torque teno seal virus 3, Torque teno seal virus 8, Torque teno seal virus 9, Torque teno zalophus virus 1, Torque teno equus virus 1, Torque teno seal virus 4, Torque teno seal virus 5, Torque teno canis virus, Torque teno douroucouli virus, Avocado sunblotch viroid, Eggplant latent viroid, Apple hammerhead viroid, Chrysanthemum chlorotic mottle viroid, Peach latent mosaic viroid, Adoxophyes honmai nucleopolyhedrovirus, Agrotis ipsilon multiple nucleopolyhedrovirus, Agrotis segetum nucleopolyhedrovirus A, Agrotis segetum nucleopolyhedrovirus B, Antheraea pernyi nucleopolyhedrovirus, Anticarsia gemmatalis multiple nucleopolyhedrovirus, Autographa californica multiple nucleopolyhedrovirus, Bombyx mori nucleopolyhedrovirus, Buzura suppressaria nucleopolyhedrovirus, Catopsilia pomona nucleopolyhedrovirus, Choristoneura fumiferana DEF multiple nucleopolyhedrovirus, Choristoneura fumiferana multiple nucleopolyhedrovirus, Choristoneura murinana nucleopolyhedrovirus, Choristoneura rosaceana nucleopolyhedrovirus, Chrysodeixis chalcites nucleopolyhedrovirus, Chrysodeixis includens nucleopolyhedrovirus, Clanis bilineata nucleopolyhedrovirus, Condylorrhiza vestigialis nucleopolyhedrovirus, Cryptophlebia peltastica nucleopolyhedrovirus, Cyclophragma undans nucleopolyhedrovirus, Ectropis obliqua nucleopolyhedrovirus, Epiphyas postvittana nucleopolyhedrovirus, Euproctis pseudoconspersa nucleopolyhedrovirus, Helicoverpa armigera nucleopolyhedrovirus, Hemileuca species nucleopolyhedrovirus, Hyphantria cunea nucleopolyhedrovirus, Hyposidra talaca nucleopolyhedrovirus, Lambdina fiscellaria nucleopolyhedrovirus, Leucania separata nucleopolyhedrovirus, Lonomia obliqua nucleopolyhedrovirus, Lymantria dispar multiple nucleopolyhedrovirus, Lymantria xylina nucleopolyhedrovirus, Mamestra brassicae multiple nucleopolyhedrovirus, Mamestra configurata nucleopolyhedrovirus A, Mamestra configurata nucleopolyhedrovirus B, Maruca vitrata nucleopolyhedrovirus, Mythimna unipuncta nucleopolyhedrovirus A, Mythimna unipuncta nucleopolyhedrovirus B, Operophtera brumata nucleopolyhedrovirus, Orgyia leucostigma nucleopolyhedrovirus, Orgyia pseudotsugata multiple nucleopolyhedrovirus, Oxyplax ochracea nucleopolyhedrovirus, Peridroma saucia nucleopolyhedrovirus, Perigonia lusca nucleopolyhedrovirus, Spodoptera eridania nucleopolyhedrovirus, Spodoptera exempta nucleopolyhedrovirus, Spodoptera exigua multiple nucleopolyhedrovirus, Spodoptera frugiperda multiple nucleopolyhedrovirus, Spodoptera littoralis nucleopolyhedrovirus, Spodoptera litura nucleopolyhedrovirus, Sucra jujuba nucleopolyhedrovirus, Thysanoplusia orichalcea nucleopolyhedrovirus, Trichoplusia ni single nucleopolyhedrovirus, Urbanus proteus nucleopolyhedrovirus, Wiseana signata nucleopolyhedrovirus, Adoxophyes orana granulovirus, Agrotis segetum granulovirus, Artogeia rapae granulovirus, Choristoneura fumiferana granulovirus, Clostera anachoreta granulovirus, Clostera anastomosis granulovirus A, Clostera anastomosis granulovirus B, Cnaphalocrocis medinalis granulovirus, Cryptophlebia leucotreta granulovirus, Cydia pomonella granulovirus, Diatraea saccharalis granulovirus, Epinotia aporema granulovirus, Erinnyis ello granulovirus, Harrisina brillians granulovirus, Helicoverpa armigera granulovirus, Lacanobia oleracea granulovirus, Mocis latipes granulovirus, Mythimna unipuncta granulovirus A, Mythimna unipuncta granulovirus B, Phthorimaea operculella granulovirus, Plodia interpunctella granulovirus, Plutella xylostella granulovirus, Spodoptera frugiperda granulovirus, Spodoptera litura granulovirus, Trichoplusia ni granulovirus, Xestia c-nigrum granulovirus, Culex nigripalpus nucleopolyhedrovirus, Neodiprion lecontei nucleopolyhedrovirus, Neodiprion sertifer nucleopolyhedrovirus, Acidianus two-tailed virus, Aeropyrum pernix bacilliform virus 1, Flavobacterium virus FLiP, Sulfolobus spindle-shaped virus 1, Sulfolobus spindle-shaped virus 2, Sulfolobus spindle-shaped virus 4, Sulfolobus spindle-shaped virus 5, Sulfolobus spindle-shaped virus 7, Sulfolobus spindle-shaped virus 8, Sulfolobus spindle-shaped virus 9, Acidianus spindle-shaped virus 1, Sulfolobus spindle-shaped virus 6, Pyrobaculum spherical virus, Thermoproteus tenax spherical virus 1, Sulfolobus newzealandicus droplet-shaped virus, Aeropyrum pernix ovoid virus 1, Salterprovirus His1, Glossina hytrosavirus, Musca hytrosavirus, White spot syndrome virus, Gryllus bimaculatus nudivirus, Oryctes rhinoceros nudivirus, Heliothis zea nudivirus, Sulfolobus ellipsoid virus 1, Acholeplasma virus L2, Apanteles crassicornis bracovirus, Apanteles fumiferanae bracovirus, Ascogaster argentifrons bracovirus, Ascogaster quadridentata bracovirus, Cardiochiles nigriceps bracovirus, Chelonus altitudinis bracovirus, Chelonus blackburni bracovirus, Chelonus inanitus bracovirus, Chelonus insularis bracovirus, Chelonus near curvimaculatus bracovirus, Chelonus texanus bracovirus, Cotesia congregata bracovirus, Cotesia flavipes bracovirus, Cotesia glomerata bracovirus, Cotesia hyphantriae bracovirus, Cotesia kariyai bracovirus, Cotesia marginiventris bracovirus, Cotesia melanoscela bracovirus, Cotesia rubecula bracovirus, Cotesia schaeferi bracovirus, Diolcogaster facetosa bracovirus, Glyptapanteles flavicoxis bracovirus, Glyptapanteles indiensis bracovirus, Glyptapanteles liparidis bracovirus, Hypomicrogaster canadensis bracovirus, Hypomicrogaster ectdytolophae bracovirus, Microplitis croceipes bracovirus, Microplitis demolitor bracovirus, Phanerotoma flavitestacea bracovirus, Pholetesor ornigis bracovirus, Protapanteles paleacritae bracovirus, Tranosema rostrale bracovirus, Campoletis aprilis ichnovirus, Campoletis flavicincta ichnovirus, Campoletis sonorensis ichnovirus, Casinaria arjuna ichnovirus, Casinaria forcipata ichnovirus, Casinaria infesta ichnovirus, Diadegma acronyctae ichnovirus, Diadegma interruptum ichnovirus, Diadegma terebrans ichnovirus, Enytus montanus ichnovirus, Eriborus terebrans ichnovirus, Glypta fumiferanae ichnovirus, Hyposoter annulipes ichnovirus, Hyposoter exiguae ichnovirus, Hyposoter fugitivus ichnovirus, Hyposoter lymantriae ichnovirus, Hyposoter pilosulus ichnovirus, Hyposoter rivalis ichnovirus, Olesicampe benefactor ichnovirus, Olesicampe geniculatae ichnovirus, Synetaeris tenuifemur ichnovirus, Alphaportoglobovirus SPV2, Sulfolobus alphaportoglobovirus 1, Apple dimple fruit viroid, Apple scar skin viroid, Australian grapevine viroid, Citrus bent leaf viroid, Citrus dwarfing viroid, Citrus viroid V, Citrus viroid VI, Grapevine yellow speckle viroid 1, Grapevine yellow speckle viroid 2, Pear blister canker viroid, Citrus bark cracking viroid, Coconut cadang-cadang viroid, Coconut tinangaja viroid, Hop latent viroid, Coleus blumei viroid 1, Coleus blumei viroid 2, Coleus blumei viroid 3, Dahlia latent viroid, Hop stunt viroid, Chrysanthemum stunt viroid, Citrus exocortis viroid, Columnea latent viroid, Iresine viroid 1, Pepper chat fruit viroid, Potato spindle tuber viroid, Tomato apical stunt viroid, Tomato chlorotic dwarf viroid, Tomato planta macho viroid, Aeropyrum coil-shaped virus, Nitmarvirus NSV1, Ageratum leaf curl Buea betasatellite, Ageratum leaf curl Cameroon betasatellite, Ageratum yellow leaf curl betasatellite, Ageratum yellow vein betasatellite, Ageratum yellow vein India betasatellite, Ageratum yellow vein Sri Lanka betasatellite, Alternanthera yellow vein betasatellite, Andrographis yellow vein leaf curl betasatellite, Bhendi yellow vein mosaic betasatellite, Cardiospermum yellow leaf curl betasatellite, Chili leaf curl betasatellite, Chili leaf curl Jaunpur betasatellite, Chili leaf curl Sri Lanka betasatellite, Cotton leaf curl Gezira betasatellite, Cotton leaf curl Multan betasatellite, Croton yellow vein mosaic betasatellite, Eupatorium yellow vein betasatellite, Eupatorium yellow vein mosaic betasatellite, French bean leaf curl betasatellite, Hedyotis yellow mosaic betasatellite, Honeysuckle yellow vein betasatellite, Honeysuckle yellow vein mosaic betasatellite, Malvastrum leaf curl betasatellite, Malvastrum leaf curl Guangdong betasatellite, Mirabilis leaf curl betasatellite, Momordica yellow mosaic betasatellite, Mungbean yellow mosaic betasatellite, Okra leaf curl Oman betasatellite, Papaya leaf curl betasatellite, Papaya leaf curl China betasatellite, Papaya leaf curl India betasatellite, Rhynchosia yellow mosaic betasatellite, Rose leaf curl betasatellite, Siegesbeckia yellow vein betasatellite, Tobacco curly shoot betasatellite, Tobacco leaf curl betasatellite, Tobacco leaf curl Japan betasatellite, Tobacco leaf curl Patna betasatellite, Tomato leaf curl Bangalore betasatellite, Tomato leaf curl Bangladesh betasatellite, Tomato leaf curl betasatellite, Tomato leaf curl China betasatellite, Tomato leaf curl Gandhinagar betasatellite, Tomato leaf curl Java betasatellite, Tomato leaf curl Joydebpur betasatellite, Tomato leaf curl Laguna betasatellite, Tomato leaf curl Laos betasatellite, Tomato leaf curl Malaysia betasatellite, Tomato leaf curl Nepal betasatellite, Tomato leaf curl Patna betasatellite, Tomato leaf curl Philippine betasatellite, Tomato leaf curl Sri Lanka betasatellite, Tomato leaf curl Yemen betasatellite, Tomato yellow leaf curl China betasatellite, Tomato yellow leaf curl Rajasthan betasatellite, Tomato yellow leaf curl Shandong betasatellite, Tomato yellow leaf curl Thailand betasatellite, Tomato yellow leaf curl Vietnam betasatellite, Tomato yellow leaf curl Yunnan betasatellite, Vernonia yellow vein betasatellite, Vernonia yellow vein Fujian betasatellite, Croton yellow vein deltasatellite, Malvastrum leaf curl deltasatellite, Sida golden yellow vein deltasatellite 1, Sida golden yellow vein deltasatellite 2, Sida golden yellow vein deltasatellite 3, Sweet potato leaf curl deltasatellite 1, Sweet potato leaf curl deltasatellite 2, Sweet potato leaf curl deltasatellite 3, Tomato leaf curl deltasatellite, Tomato yellow leaf distortion deltasatellite 1, Tomato yellow leaf distortion deltasatellite 2, Pyrobaculum filamentous virus 1, Thermoproteus tenax virus 1, Hepatitis delta virus, Heterocapsa circularisquama DNA virus 01, and Rhizidiomyces virus. Other viruses include the ICTV Master species list (https://talk.ictvonline.org/files/master-species-lists/m/msl/9601), which is incorporated by reference herein.

### Amino Acid and Nucleic Acid Sequences

[0418] Table 2 provides a summary of the amino acid and nucleic acid sequences.

TABLE 2
Summary of sequences

| SEQ ID | | |
|---|---|---|
| NO | Type | Description |
| 1 | Amino Acid | PspCas13b |
| 2 | Amino Acid | PspCas13b Truncation |
| 3 | Amino Acid | AspCas13b |
| 4 | Amino Acid | AspCas13c |
| 5 | Amino Acid | BmaCas13a |
| 6 | Amino Acid | BzoCas13b |
| 7 | Amino Acid | CamCas13a |
| 8 | Amino Acid | CcaCas13b |
| 9 | Amino Acid | Cga2Cas13a |
| 10 | Amino Acid | CgaCas13a |
| 11 | Amino Acid | EbaCas13a |
| 12 | Amino Acid | EreCas13a |
| 13 | Amino Acid | EsCas13d |
| 14 | Amino Acid | FbrCas13b |
| 15 | Amino Acid | FnbCas13c |
| 16 | Amino Acid | FndCas13c |
| 17 | Amino Acid | FnfCas13c |
| 18 | Amino Acid | FnsCas13c |
| 19 | Amino Acid | FpeCas13c |
| 20 | Amino Acid | FulCas13c |
| 21 | Amino Acid | HheCas13a |
| 22 | Amino Acid | LbfCas13a |
| 23 | Amino Acid | LbmCas13a |
| 24 | Amino Acid | LbnCas13a |
| 25 | Amino Acid | LbuCas13a |
| 26 | Amino Acid | LseCas13a |
| 27 | Amino Acid | LshCas13a |
| 28 | Amino Acid | LspCas13a |
| 29 | Amino Acid | Lwa2Cas13a |
| 30 | Amino Acid | LwaCas13a |
| 31 | Amino Acid | LweCas13a |
| 32 | Amino Acid | PauCas13b |
| 33 | Amino Acid | PbuCas13b |
| 34 | Amino Acid | PgiCas13b |
| 35 | Amino Acid | PguCas13b |
| 36 | Amino Acid | Pin2Cas13b |
| 37 | Amino Acid | Pin3Cas13b |
| 38 | Amino Acid | PinCas13b |
| 39 | Amino Acid | PprCas13a |
| 40 | Amino Acid | PsaCas13b |
| 41 | Amino Acid | PsmCas13b |
| 42 | Amino Acid | RanCas13b |
| 43 | Amino Acid | RcdCas13a |
| 44 | Amino Acid | RcrCas13a |
| 45 | Amino Acid | RcsCas13a |
| 46 | Amino Acid | UrCas13d |
| 47 | Amino Acid | dPspCas13b |
| 48 | Amino Acid | dPspCas13b truncation |
| 49 | Amino Acid | eGFP |
| 50 | Amino Acid | mCherry |
| 51 | Amino Acid | sfCHERRY(1-10) |
| 52 | Amino Acid | sfCHERRY(1-10)-L-(11) |
| 53 | Amino Acid | 7xS11 |
| 54 | Amino Acid | sfGFP |
| 55 | Amino Acid | sfGFP(1-10) |
| 56 | Amino Acid | sfGFP(1-10)-L-(11) |
| 57 | Amino Acid | Linker sequence 1 |
| 58 | Amino Acid | Linker sequence 2 |
| 59 | Amino Acid | Linker sequence 3 |
| 60 | Amino Acid | Linker sequence 4 |
| 61 | Amino Acid | Linker sequence 5 |
| 62 | Amino Acid | Linker sequence 6 |
| 63 | Amino Acid | Linker sequence 7 |
| 64 | Amino Acid | Linker sequence 8 |
| 65 | Amino Acid | Linker sequence 9 |
| 66 | Amino Acid | 3xFlag |
| 67 | Amino Acid | Ty1 NLS |
| 68 | Amino Acid | Ty2 NLS |
| 69 | Amino Acid | MAK11 |
| 70 | Amino Acid | 1xSV40 |
| 71 | Amino Acid | 3xSV40 |
| 72 | Amino Acid | NPM |
| 73 | Amino Acid | STH1 |
| 74 | Amino Acid | INO4 |
| 75 | Amino Acid | Nuclear Export Signal (NES) |
| 76 | Amino Acid | Nuclear Export Signal (NES) |
| 77 | Amino Acid | N-terminal 1x Mitochondrial Targeting Sequence |
| 78 | Amino Acid | N-terminal 4x Mitochondrial Targeting Sequence |
| 79 | Amino Acid | N-terminal Secretory Signal Sequence (IL-2) |
| 80 | Amino Acid | N-terminal Myristoylation (Membrane Targeting Sequence) |
| 81 | Amino Acid | ER Localization - N-terminal Calsequestrin leader sequence |
| 82 | Amino Acid | ER Localization - C-terminal KDEL retention signal |
| 83 | Amino Acid | C-terminal Peroxisome Targeting Sequence |
| 84 | Amino Acid | HlightR Green (Ty1) |
| 85 | Amino Acid | HlightR Green (Ty2) |
| 86 | Amino Acid | HlightR Green (NES) |
| 87 | Amino Acid | HlightR Green (NES) |
| 88 | Amino Acid | HlightR Green (N-terminal 1x Mitochondrial Targeting Sequence) |
| 89 | Amino Acid | HlightR Green (N-terminal 4x Mitochondrial Targeting Sequence) |
| 90 | Amino Acid | HlightR Green (N-terminal Secretory Signal Sequence (IL-2)) |
| 91 | Amino Acid | HlightR Green (N-terminal Myristoylation (Membrane Targeting Sequence)) |
| 92 | Amino Acid | HlightR Green (ER Localization - N-terminal Calsequestrin leader sequence) |
| 93 | Amino Acid | HlightR Green (ER Localization - C-terminal KDEL retention signal) |
| 94 | Amino Acid | HlightR Green (C-terminal Peroxisome Targeting Sequence) |
| 95 | Amino Acid | HlightR Green (Ty1) - short |
| 96 | Amino Acid | HlightR Green (Ty2) - short |
| 97 | Amino Acid | HlightR Green (NES) - short |
| 98 | Amino Acid | HlightR Green (NES) - short |
| 99 | Amino Acid | HlightR Green (N-terminal 1x Mitochondrial Targeting Sequence) - short |
| 100 | Amino Acid | HlightR Green (N-terminal 4x Mitochondrial Targeting Sequence) - short |
| 101 | Amino Acid | HlightR Green (N-terminal Secretory Signal Sequence (IL-2) - short |
| 102 | Amino Acid | HlightR Green (N-terminal Myristoylation (Membrane Targeting Sequence) - short |
| 103 | Amino Acid | HlightR Green (ER Localization - N-terminal Calsequestrin leader sequence) - short |
| 104 | Amino Acid | HlightR Green (ER Localization - C-terminal KDEL retention signal) - short |
| 105 | Amino Acid | HlightR Green (C-terminal Peroxisome Targeting Sequence) - short |
| 106 | Amino Acid | HlightR Red |
| 107 | Amino Acid | HlightR Red (Ty2) |
| 108 | Amino Acid | HlightR Red (NES) |
| 109 | Amino Acid | HlightR Red (NES) |
| 110 | Amino Acid | HlightR Red (N-terminal 1x Mitochondrial Targeting Sequence) |
| 111 | Amino Acid | HlightR Red (N-terminal 4x Mitochondrial Targeting Sequence) |
| 112 | Amino Acid | HlightR Red (N-terminal Secretory Signal Sequence (IL-2)) |
| 113 | Amino Acid | HlightR Red (N-terminal Myristoylation (Membrane Targeting Sequence)) |
| 114 | Amino Acid | HlightR Red (ER Localization - N-terminal Calsequestrin leader sequence) |
| 115 | Amino Acid | HlightR Red (ER Localization - C-terminal KDEL retention signal) |
| 116 | Amino Acid | HlightR Red (C-terminal Peroxisome Targeting Sequence) |
| 117 | Amino Acid | HlightR Red (Ty1) - short |
| 118 | Amino Acid | HlightR Red (Ty2) - short |
| 119 | Amino Acid | HlightR Red (NES) - short |
| 120 | Amino Acid | HlightR Red (NES) - short |
| 121 | Amino Acid | HlightR Red (N-terminal 1x Mitochondrial Targeting Sequence) - short |
| 122 | Amino Acid | HlightR Red (N-terminal 4x Mitochondrial Targeting Sequence) - short |
| 123 | Amino Acid | HlightR Red (N-terminal Secretory Signal Sequence (IL-2) - short |
| 124 | Amino Acid | HlightR Red (N-terminal Myristoylation (Membrane Targeting Sequence) - short |
| 125 | Amino Acid | HlightR Red (ER Localization - N-terminal Calsequestrin leader sequence) - short |
| 126 | Amino Acid | HlightR Red (ER Localization - C-terminal KDEL retention signal) - short |
| 127 | Amino Acid | HlightR Red (C-terminal Peroxisome Targeting Sequence) - short |
| 128 | Amino Acid | HiLightR-S11 |
| 129 | Amino Acid | HlightR-S11 (Ty2) |
| 130 | Amino Acid | HlightR-S11 (NES) |
| 131 | Amino Acid | HlightR-S11 (NES) |
| 132 | Amino Acid | HlightR-S11 (N-terminal 1x Mitochondrial Targeting Sequence) |
| 133 | Amino Acid | HlightR-S11 (N-terminal 4x Mitochondrial Targeting Sequence) |
| 134 | Amino Acid | HlightR-S11 (N-terminal Secretory Signal Sequence (IL-2)) |
| 135 | Amino Acid | HlightR-S11 (N-terminal Myristoylation (Membrane Targeting Sequence)) |
| 136 | Amino Acid | HlightR-S11 (ER Localization - N-terminal Calsequestrin leader sequence) |
| 137 | Amino Acid | HlightR-S11 (ER Localization - C-terminal KDEL retention signal) |
| 138 | Amino Acid | HlightR-S11 (C-terminal Peroxisome Targeting Sequence) |
| 139 | Amino Acid | HiLightR-S11 (Ty1) - short |
| 140 | Amino Acid | HlightR-S11 (Ty2) - short |
| 141 | Amino Acid | HlightR-S11 (NES) - short |
| 142 | Amino Acid | HlightR-S11 (NES) - short |
| 143 | Amino Acid | HlightR-S11 (N-terminal 1x Mitochondrial Targeting Sequence) - short |
| 144 | Amino Acid | HlightR-S11 (N-terminal 4x Mitochondrial Targeting Sequence) - short |
| 145 | Amino Acid | HlightR-S11 (N-terminal Secretory Signal Sequence (IL-2) - short |
| 146 | Amino Acid | HlightR-S11 (N-terminal Myristoylation (Membrane Targeting Sequence) - short |
| 147 | Amino Acid | HlightR-S11 (ER Localization - N-terminal Calsequestrin leader sequence) - short |
| 148 | Amino Acid | HlightR-S11 (ER Localization - C-terminal KDEL retention signal) - short |
| 149 | Amino Acid | HlightR-S11 (C-terminal Peroxisome Targeting Sequence) - short |
| 150 | Amino Acid | EraseR |
| 151 | Amino Acid | EraseR (Ty2) |
| 152 | Amino Acid | EraseR (NES) |
| 153 | Amino Acid | EraseR (NES) |
| 154 | Amino Acid | EraseR (N-terminal 1x Mitochondrial Targeting Sequence) |
| 155 | Amino Acid | EraseR (N-terminal 4x Mitochondrial Targeting Sequence) |
| 156 | Amino Acid | EraseR (N-terminal Secretory Signal Sequence (IL-2)) |
| 157 | Amino Acid | EraseR (N-terminal Myristoylation (Membrane Targeting Sequence)) |
| 158 | Amino Acid | EraseR (ER Localization - N-terminal Calsequestrin leader sequence) |
| 159 | Amino Acid | EraseR (ER Localization - C-terminal KDEL retention signal) |
| 160 | Amino Acid | EraseR (C-terminal Peroxisome Targeting Sequence) |
| 161 | Amino Acid | EraseR - Short |
| 162 | Amino Acid | EraseR (Ty2) - Short |
| 163 | Amino Acid | EraseR (NES) - Short |
| 164 | Amino Acid | EraseR (NES) - Short |
| 165 | Amino Acid | EraseR (N-terminal 1x Mitochondrial Targeting Sequence) - Short |
| 166 | Amino Acid | EraseR (N-terminal 4x Mitochondrial Targeting Sequence) - Short |
| 167 | Amino Acid | EraseR (N-terminal Secretory Signal Sequence (IL-2)) - Short |
| 168 | Amino Acid | EraseR (N-terminal Myristoylation (Membrane Targeting Sequence)) - Short |
| 169 | Amino Acid | EraseR (ER Localization - N-terminal Calsequestrin leader sequence) - Short |
| 170 | Amino Acid | EraseR (ER Localization - C-terminal KDEL retention signal) - Short |
| 171 | Amino Acid | EraseR (C-terminal Peroxisome Targeting Sequence) - Short |
| 172 | Amino Acid | SARS-CoV-2 Spike Protein Wild Type sequence |
| 173 | Amino Acid | SARS-CoV-2 Spike Protein with C-terminal 27 aa deletion) |
| 174 | Amino Acid | SARS-CoV-2 Spike Protein with HIV envelope membrane proximal sequence (S-H2) |
| 175 | Amino Acid | SARS-CoV-2 Spike Protein with VSV-G envelope protein cytoplasmic tail sequence |
| 176 | Amino Acid | SARS-CoV-2 Spike Protein with HIV envelope protein cytoplasmic tail |
| 177 | Amino Acid | SARS-CoV-2 Spike Protein with HIV transmembrane and cytoplasmic tail |
| 178 | Amino Acid | SARS-CoV-2 Spike Protein with VSV-G transmembrane and cytoplasmic tail |
| | | sequence |
| 179 | Amino Acid | SARS-CoV-1 Spike Protein (WT) |
| 180 | Amino Acid | SARS-CoV-1 Spike Protein N-term SP(CD5) and C-term truncation (aka SARS-CoV- |
| | | 1 4LV) |
| 181 | Amino Acid | SARS-CoV-1 Spike Protein N-term SP(CD5) and VSV-G transmembrane and |
| | | cytoplasmic tail |
| 182 | Amino Acid | SARS-CoV-2 Spike Protein N-term SP(CD5) and C-term truncation (aka SARS-CoV- |
| | | 2 4LV) |
| 183 | Amino Acid | SARS-CoV-2 Spike Protein N-term SP(CD5) and VSV-G transmembrane and |
| | | cytoplasmic tail |
| 184 | Amino Acid | VSV-G envelope protein for broad cell type transduction |
| 185 | Amino Acid | MBNL1 |
| 186 | Amino Acid | mCherry-MBNL 1 |
| 187 | Amino Acid | High Sensitivity Luciferase Expression Cassette Contains protein degradation |
| | | sequence (hCl1-pest fusion) at C-terminus |
| 188 | Nucleic Acid | PspCas13b |
| 189 | Nucleic Acid | PspCas13b Truncation |
| 190 | Nucleic Acid | dPspCas13b |
| 191 | Nucleic Acid | dPspCas13b truncation |
| 192 | Nucleic Acid | eGFP |
| 193 | Nucleic Acid | mCherry |
| 194 | Nucleic Acid | 7xS11 |
| 195 | Nucleic Acid | sfGFP |
| 196 | Nucleic Acid | Linker sequence 1 |
| 197 | Nucleic Acid | Linker sequence 1 |
| 198 | Nucleic Acid | Linker sequence 2 |
| 199 | Nucleic Acid | Linker sequence 3 |
| 200 | Nucleic Acid | 3xFlag |
| 201 | Nucleic Acid | Ty1 NLS |
| 202 | Nucleic Acid | NES |
| 203 | Nucleic Acid | Nuclear Export Signal (NES) |
| 204 | Nucleic Acid | N-terminal 1x Mitochondrial Targeting Sequence |
| 205 | Nucleic Acid | N-terminal 4x Mitochondrial Targeting Sequence |
| 206 | Nucleic Acid | N-terminal Secretory Signal Sequence (IL-2) |
| 207 | Nucleic Acid | N-terminal Myristoylation (Membrane Targeting Sequence) |
| 208 | Nucleic Acid | ER Localization - N-terminal Calsequestrin leader sequence |
| 209 | Nucleic Acid | ER Localization - C-terminal KDEL retention signal |
| 210 | Nucleic Acid | C-terminal Peroxisome Targeting Sequence |
| 211 | Nucleic Acid | HlightR Green (Ty1) |
| 212 | Nucleic Acid | HlightR Green (NES) |
| 213 | Nucleic Acid | HlightR Green (NES) |
| 214 | Nucleic Acid | HlightR Green (N-terminal 1x Mitochondrial Targeting Sequence) |
| 215 | Nucleic Acid | HlightR Green (N-terminal 4x Mitochondrial Targeting Sequence) |
| 216 | Nucleic Acid | HlightR Green (N-terminal Secretory Signal Sequence (IL-2)) |
| 217 | Nucleic Acid | HlightR Green (N-terminal Myristoylation (Membrane Targeting Sequence)) |
| 218 | Nucleic Acid | HlightR Green (ER Localization - N-terminal Calsequestrin leader sequence) |
| 219 | Nucleic Acid | HlightR Green (ER Localization - C-terminal KDEL retention signal) |
| 220 | Nucleic Acid | HlightR Green (C-terminal Peroxisome Targeting Sequence) |
| 221 | Nucleic Acid | HlightR Green (Ty1) - short |
| 222 | Nucleic Acid | HlightR Green (NES) - short |
| 223 | Nucleic Acid | HlightR Green (NES) - short |
| 224 | Nucleic Acid | HlightR Green (N-terminal 1x Mitochondrial Targeting Sequence) - short |
| 225 | Nucleic Acid | HlightR Green (N-terminal 4x Mitochondrial Targeting Sequence) - short |
| 226 | Nucleic Acid | HlightR Green (N-terminal Secretory Signal Sequence (IL-2) - short |
| 227 | Nucleic Acid | HlightR Green (N-terminal Myristoylation (Membrane Targeting Sequence) - short |
| 228 | Nucleic Acid | HlightR Green (ER Localization - N-terminal Calsequestrin leader sequence) - short |
| 229 | Nucleic Acid | HlightR Green (ER Localization - C-terminal KDEL retention signal) - short |
| 230 | Nucleic Acid | HlightR Green (C-terminal Peroxisome Targeting Sequence) - short |
| 231 | Nucleic Acid | HlightR Red (Ty1) |
| 232 | Nucleic Acid | HlightR Red (NES) |
| 233 | Nucleic Acid | HlightR Red (NES) |
| 234 | Nucleic Acid | HlightR Red (N-terminal 1x Mitochondrial Targeting Sequence) |
| 235 | Nucleic Acid | HlightR Red (N-terminal 4x Mitochondrial Targeting Sequence) |
| 236 | Nucleic Acid | HlightR Red (N-terminal Secretory Signal Sequence (IL-2)) |
| 237 | Nucleic Acid | HlightR Red (N-terminal Myristoylation (Membrane Targeting Sequence)) |
| 238 | Nucleic Acid | HlightR Red (ER Localization - N-terminal Calsequestrin leader sequence) |
| 239 | Nucleic Acid | HlightR Red (ER Localization - C-terminal KDEL retention signal) |
| 240 | Nucleic Acid | HlightR Red (C-terminal Peroxisome Targeting Sequence) |
| 241 | Nucleic Acid | HlightR Red (Ty1) - short |
| 242 | Nucleic Acid | HlightR Red (NES) - short |
| 243 | Nucleic Acid | HlightR Red (NES) - short |
| 244 | Nucleic Acid | HlightR Red (N-terminal 1x Mitochondrial Targeting Sequence) - short |
| 245 | Nucleic Acid | HlightR Red (N-terminal 4x Mitochondrial Targeting Sequence) - short |
| 246 | Nucleic Acid | HlightR Red (N-terminal Secretory Signal Sequence (IL-2) - short |
| 247 | Nucleic Acid | HlightR Red (N-terminal Myristoylation (Membrane Targeting Sequence) - short |
| 248 | Nucleic Acid | HlightR Red (ER Localization - N-terminal Calsequestrin leader sequence) - short |
| 249 | Nucleic Acid | HlightR Red (ER Localization - C-terminal KDEL retention signal) - short |
| 250 | Nucleic Acid | HlightR Red (C-terminal Peroxisome Targeting Sequence) - short |
| 251 | Nucleic Acid | HiLightR-S11 (Ty1) |
| 252 | Nucleic Acid | HlightR-S11 (NES) |
| 253 | Nucleic Acid | HlightR-S11 (NES) |
| 254 | Nucleic Acid | HlightR-S11 (N-terminal 1x Mitochondrial Targeting Sequence) |
| 255 | Nucleic Acid | HlightR-S11 (N-terminal 4x Mitochondrial Targeting Sequence) |
| 256 | Nucleic Acid | HlightR-S11 (N-terminal Secretory Signal Sequence (IL-2)) |
| 257 | Nucleic Acid | HlightR-S11 (N-terminal Myristoylation (Membrane Targeting Sequence)) |
| 258 | Nucleic Acid | HlightR-S11 (ER Localization - N-terminal Calsequestrin leader sequence) |
| 259 | Nucleic Acid | HlightR-S11 (ER Localization - C-terminal KDEL retention signal) |
| 260 | Nucleic Acid | HlightR-S11 (C-terminal Peroxisome Targeting Sequence) |
| 261 | Nucleic Acid | HiLightR-S11 (Ty1) - short |
| 262 | Nucleic Acid | HlightR-S11 (NES) - short |
| 263 | Nucleic Acid | HlightR-S11 (NES) - short |
| 264 | Nucleic Acid | HlightR-S11 (N-terminal 1x Mitochondrial Targeting Sequence) - short |
| 265 | Nucleic Acid | HlightR-S11 (N-terminal 4x Mitochondrial Targeting Sequence) - short |
| 266 | Nucleic Acid | HlightR-S11 (N-terminal Secretory Signal Sequence (IL-2) - short |
| 267 | Nucleic Acid | HlightR-S11 (N-terminal Myristoylation (Membrane Targeting Sequence) - short |
| 268 | Nucleic Acid | HlightR-S11 (ER Localization - N-terminal Calsequestrin leader sequence) - short |
| 269 | Nucleic Acid | HlightR-S11 (ER Localization - C-terminal KDEL retention signal) - short |
| 270 | Nucleic Acid | HlightR-S11 (C-terminal Peroxisome Targeting Sequence) - short |
| 271 | Nucleic Acid | EraseR (Ty1) |
| 272 | Nucleic Acid | EraseR (NES) |
| 273 | Nucleic Acid | EraseR (NES) |
| 274 | Nucleic Acid | EraseR (N-terminal 1x Mitochondrial Targeting Sequence) |
| 275 | Nucleic Acid | EraseR (N-terminal 4x Mitochondrial Targeting Sequence) |
| 276 | Nucleic Acid | EraseR (N-terminal Secretory Signal Sequence (IL-2)) |
| 277 | Nucleic Acid | EraseR (N-terminal Myristoylation (Membrane Targeting Sequence)) |
| 278 | Nucleic Acid | EraseR (ER Localization - N-terminal Calsequestrin leader sequence) |
| 279 | Nucleic Acid | EraseR (ER Localization - C-terminal KDEL retention signal) |
| 280 | Nucleic Acid | EraseR (C-terminal Peroxisome Targeting Sequence) |
| 281 | Nucleic Acid | EraseR (Ty1) - short |
| 282 | Nucleic Acid | EraseR (NES) - short |
| 283 | Nucleic Acid | EraseR (NES) - short |
| 284 | Nucleic Acid | EraseR (N-terminal 1x Mitochondrial Targeting Sequence) - short |
| 285 | Nucleic Acid | EraseR (N-terminal 4x Mitochondrial Targeting Sequence) - short |
| 286 | Nucleic Acid | EraseR (N-terminal Secretory Signal Sequence (IL-2) - short |
| 287 | Nucleic Acid | EraseR (N-terminal Myristoylation (Membrane Targeting Sequence) - short |
| 288 | Nucleic Acid | EraseR (ER Localization - N-terminal Calsequestrin leader sequence) - short |
| 289 | Nucleic Acid | EraseR (ER Localization - C-terminal KDEL retention signal) - short |
| 290 | Nucleic Acid | EraseR (C-terminal Peroxisome Targeting Sequence) - short |
| 291 | Nucleic Acid | BzoCas13b crRNA direct repeat sequence |
| 292 | Nucleic Acid | PbTCas13b crRNA direct repeat sequence |
| 293 | Nucleic Acid | PspCas13b crRNA direct repeat sequence |
| 294 | Nucleic Acid | PspCas13b crRNA direct repeat sequence T17C |
| 295 | Nucleic Acid | PspCas13b crRNA direct repeat sequence T17A |
| 296 | Nucleic Acid | PspCas13b crRNA direct repeat sequence TI7G |
| 297 | Nucleic Acid | PspCas13b crRNA direct repeat sequence T18C |
| 298 | Nucleic Acid | PspCas13b crRNA direct repeat sequence T18A |
| 299 | Nucleic Acid | PspCas13b crRNA direct repeat sequence T18G |
| 300 | Nucleic Acid | PspCas13b crRNA direct repeat sequence T19C |
| 301 | Nucleic Acid | PspCas13b crRNA target sequence CASx9 |
| 302 | Nucleic Acid | PspCas13b crRNA target sequence CASx9-f2 |
| 303 | Nucleic Acid | PspCas13b crRNA target sequence CASx9-f3 |
| 304 | Nucleic Acid | DMPK CUG Exp |
| 305 | Nucleic Acid | CUG exp |
| 306 | Nucleic Acid | CUGx17 |
| 307 | Nucleic Acid | SARS-CoV-2 Leader Sequence |
| 308 | Nucleic Acid | SARS-CoV-2 Leader crRNA Target A |
| 309 | Nucleic Acid | SARS-CoV-2 Leader crRNA Target B |
| 310 | Nucleic Acid | SARS-CoV-2 Leader crRNA Target C |
| 311 | Nucleic Acid | SARS-CoV-2 Leader crRNA Target D |
| 312 | Nucleic Acid | SARS-CoV-2 Leader crRNA Target E |
| 313 | Nucleic Acid | SARS-CoV-2 Leader crRNA Target F |
| 314 | Nucleic Acid | SARS-CoV-2 Leader crRNA Target G |
| 315 | Nucleic Acid | SARS-2-CoV S2M sequence |
| 316 | Nucleic Acid | SARS-2-CoV S2M crRNA Target A |
| 317 | Nucleic Acid | SARS-2-CoV S2M crRNA Target B |
| 318 | Nucleic Acid | SARS-2-CoV S2M crRNA Target C |
| 319 | Nucleic Acid | SARS-2-CoV S2M crRNA Target D |
| 320 | Nucleic Acid | SARS-2-CoV S2M crRNA Target E |
| 321 | Nucleic Acid | SARS-2-CoV S2M crRNA Target F |
| 322 | Nucleic Acid | Bovine Coronavirus Leader Sequence |
| 323 | Nucleic Acid | SARS-CoV-2 3′ Stem-loop II-like (S2M) Sequence |
| 324 | Nucleic Acid | SARS-CoV-2 Nucleocapsid (N) Site A |
| 325 | Nucleic Acid | SARS-CoV-2 Nucleocapsid (N) Site B |
| 326 | Nucleic Acid | SARS-CoV-2 Nucleocapsid (N) Site A Target |
| 327 | Nucleic Acid | SARS-CoV-2 Nucleocapsid (N) Site B Target |
| 328 | Nucleic Acid | H1N1 Segment 1 crRNA target |
| 329 | Nucleic Acid | H3N2 Segment 1 crRNA target |
| 330 | Nucleic Acid | H7N9 Segment 1 crRNA target |
| 331 | Nucleic Acid | H2N2 Segment 1 crRNA target |
| 332 | Nucleic Acid | H1N1 Segment 2 crRNA target |
| 333 | Nucleic Acid | H3N2 Segment 2 crRNA target |
| 334 | Nucleic Acid | H7N9 Segment 2 crRNA target |
| 335 | Nucleic Acid | H2N2 Segment 2 crRNA target |
| 336 | Nucleic Acid | H1N1 Segment 3 crRNA target |
| 337 | Nucleic Acid | H3N2 Segment 3 crRNA target |
| 338 | Nucleic Acid | H7N9 Segment 3 crRNA target |
| 339 | Nucleic Acid | H2N2 Segment 3 crRNA target |
| 340 | Nucleic Acid | H1N1 Segment 5 crRNA target |
| 341 | Nucleic Acid | H3N2 Segment 5 crRNA target |
| 342 | Nucleic Acid | H7N9 Segment 5 crRNA target |
| 343 | Nucleic Acid | H2N2 Segment 5 crRNA target |
| 344 | Nucleic Acid | H1N1 Segment 7 crRNA target |
| 345 | Nucleic Acid | H3N2 Segment 7 crRNA target |
| 346 | Nucleic Acid | H7N9 Segment 7 crRNA target |
| 347 | Nucleic Acid | H2N2 Segment 7 crRNA target |
| 348 | Nucleic Acid | CAGx9 crRNA |
| 349 | Nucleic Acid | LwCas13a CAG-F1 |
| 350 | Nucleic Acid | LwCas13a CAG-F2 |
| 351 | Nucleic Acid | LwCas13a CAG-F3 |
| 352 | Nucleic Acid | RfxCas13d CAG-F1 |
| 353 | Nucleic Acid | RfxCas13d CAG-F2 |
| 354 | Nucleic Acid | RfxCas13d CAG-F3 |
| 355 | Nucleic Acid | SARS-CoV-2 Leader Sequence |
| 356 | Nucleic Acid | SARS-CoV-2 Leader crRNA A |
| 357 | Nucleic Acid | SARS-CoV-2 Leader crRNA B |
| 358 | Nucleic Acid | SARS-CoV-2 Leader crRNA C |
| 359 | Nucleic Acid | SARS-CoV-2 Leader crRNA D |
| 360 | Nucleic Acid | SARS-CoV-2 Leader crRNA E |
| 361 | Nucleic Acid | SARS-CoV-2 Leader crRNA F |
| 362 | Nucleic Acid | SARS-CoV-2 Leader crRNA G |
| 363 | Nucleic Acid | SARS-CoV-2 S2M crRNA A |
| 364 | Nucleic Acid | SARS-CoV-2 S2M crRNA B |
| 365 | Nucleic Acid | SARS-CoV-2 S2M crRNA C |
| 366 | Nucleic Acid | SARS-CoV-2 S2M crRNA D |
| 367 | Nucleic Acid | SARS-CoV-2 S2M crRNA E |
| 368 | Nucleic Acid | SARS-CoV-2 S2M crRNA F |
| 369 | Nucleic Acid | SARS-CoV-2 Leader crRNA A |
| 370 | Nucleic Acid | SARS-CoV-2 Leader crRNA B |
| 371 | Nucleic Acid | SARS-CoV-2 Leader crRNA C |
| 372 | Nucleic Acid | SARS-CoV-2 Leader crRNA D |
| 373 | Nucleic Acid | SARS-CoV-2 Leader crRNA E |
| 374 | Nucleic Acid | SARS-CoV-2 Leader crRNA F |
| 375 | Nucleic Acid | SARS-CoV-2 Leader crRNA G |
| 376 | Nucleic Acid | BCV Leader crRNA A |
| 377 | Nucleic Acid | BCV Leader crRNA B |
| 378 | Nucleic Acid | BCV Leader crRNA C |
| 379 | Nucleic Acid | BCV Leader crRNA D |
| 380 | Nucleic Acid | BCV Leader crRNA E |
| 381 | Nucleic Acid | BCV Leader crRNA F |
| 382 | Nucleic Acid | BCV Leader crRNA G |
| 383 | Nucleic Acid | SARS-CoV-2 S2M crRNA A |
| 384 | Nucleic Acid | SARS-CoV-2 S2M crRNA B |
| 385 | Nucleic Acid | SARS-CoV-2 S2M crRNA C |
| 386 | Nucleic Acid | SARS-CoV-2 S2M crRNA D |
| 387 | Nucleic Acid | SARS-CoV-2 S2M crRNA E |
| 388 | Nucleic Acid | SARS-CoV-2 S2M crRNA F |
| 389 | Nucleic Acid | SARS-CoV-2 S2M crRNA G |
| 390 | Nucleic Acid | SARS-CoV-2 N crRNA A |
| 391 | Nucleic Acid | SARS-CoV-2 N crRNA B |
| 392 | Nucleic Acid | Flu + sense vRNA Segment 1 crRNA |
| 393 | Nucleic Acid | Flu + sense vRNA Segment 2 crRNA |
| 394 | Nucleic Acid | Flu + sense vRNA Segment 3 crRNA |
| 395 | Nucleic Acid | Flu + sense vRNA Segment 5 crRNA |
| 396 | Nucleic Acid | Flu + sense vRNA Segment 7 crRNA |
| 397 | Nucleic Acid | Flu (−) sense vRNA Segment 1 crRNA |
| 398 | Nucleic Acid | Flu (−) sense vRNA Segment 2 crRNA |
| 399 | Nucleic Acid | Flu (−) sense vRNA Segment 3 crRNA |
| 400 | Nucleic Acid | Flu (−) sense vRNA Segment 5 crRNA |
| 401 | Nucleic Acid | Flu (−) sense vRNA Segment 7 crRNA |
| 402 | Nucleic Acid | LDR-D/N-B/S2M-D crRNA array with DR loop mutations |
| 403 | Nucleic Acid | Positive-sense Five-crRNA Array sequence (Segment order 1-2-3-5-7) |
| 404 | Nucleic Acid | Negative-sense Five-crRNA Array sequence (Segment order: 2-1-3-5-7) |
| 405 | Nucleic Acid | Lentiviral Transfer Plasmid encoding Cytoplasmic PspCas13b and crRNA (hU6- |
| | | crRNA cassette-EF1a core promoter-3xFlag-NES-PspCas13b-WPRE) |
| 406 | Nucleic Acid | Lentiviral Transfer Plasmid encoding Nuclear PspCas13b and crRNA (hU6-crRNA |
| | | cassette-EF1a core promoter-3xFlag-TY1NLS-PspCas13b-WPRE) |
| 407 | Nucleic Acid | Single guide Lentiviral Gene Transfer Vector (LDR-D) 5′LTR-hU6-crRNA-CBH- |
| | | 3xFLAG-NES-PspCas13b-WPRE-3′SINLTR |
| 408 | Nucleic Acid | Triple Guide Lentiviral Gene Transfer Vector (LDR-D, N-B, S2M-D) 5′LTR-hU6- |
| | | crRNAarray-CBH-3xFLAG-NES-PspCas13b-WPRE-3′SINLTR |
| 409 | Nucleic Acid | Triple Guide AAV Viral Vector (LDR-D, N-B, S2M-D) |
| 410 | Nucleic Acid | Luciferase Expression Cassette (SV40-5′UTR-Luc coding sequence-3′UTR-SV40 |
| | | poly(A)) |
| 411 | Nucleic Acid | Enhanced Luciferase Expression Cassette (SV40 Promoter-5′UTR-Luciferase coding |
| | | sequence-3′UTR-SV40 poly(A)-SV40 Enhancer) |
| 412 | Nucleic Acid | SV40 Promoter-5′UTR-Luciferase coding sequence-hCl1-PestUTR-SV40 poly(A)- |
| | | SV40 Enhancer |
| 413 | Nucleic Acid | PspCas13b Luc-A |
| 414 | Nucleic Acid | PspCas13b Luc-B |
| 415 | Nucleic Acid | LwCas13a Non-targeting crRNA |
| 416 | Nucleic Acid | LwCas13a Luc-A crRNA |
| 417 | Nucleic Acid | LwCas13a Luc-B crRNA |
| 418 | Nucleic Acid | RfxCas13d Non-targeting crRNA |
| 419 | Nucleic Acid | RfxCas13d Luc-A crRNA |
| 420 | Nucleic Acid | RfxCas13d Luc-B crRNA |
| 421 | Nucleic Acid | Luciferase Reporter containing multiple SARS-CoV-2 Target Sequences |
| | | (SV40promoter-5′UTR SARS-CoV-2 Leader Sequence-Luciferase hCl1-Pest-3′UTR |
| | | SARS-CoV-2 N target sequence-pA-SV40Enhancer) |
| 422 | Nucleic Acid | MBNL1 |
| 423 | Nucleic Acid | mCherry-MBNL 1 |
| 424 | Nucleic Acid | pGL3P-DT12 Vector Sequence (SV40pro-Luciferase-human DMPK 3′UTR |
| | | containing CUGx12) |
| 425 | Nucleic Acid | pGL3P-DT960 Vector Sequence (SV40pro-Luciferase-human DMPK 3′UTR |
| | | containing CUGx960) |
| 426 | Nucleic Acid | EF1a-hACE2-Blast (EF1a-hACE2-BGHpA-SV40pro-Blasticidin-SV40pA) |
| 427 | Amino Acid | Ty1-like NLS O28090-0 |
| 428 | Amino Acid | Ty1-like NLS O50087-0 |
| 429 | Amino Acid | Ty1-like NLS O58353-0 |
| 430 | Amino Acid | Ty1-like NLS Q57602-0 |
| 431 | Amino Acid | Ty1-like NLS Q6L1X9-0 |
| 432 | Amino Acid | Ty1-like NLS A0K3M1-0 |
| 433 | Amino Acid | Ty1-like NLS A0LYZ1-0 |
| 434 | Amino Acid | Ty1-like NLS A1B022-0 |
| 435 | Amino Acid | Ty1-like NLS A1V8A7-0 |
| 436 | Amino Acid | Ty1-like NLS AlVIP6-0 |
| 437 | Amino Acid | Ty1-like NLS A2RDW6-0 |
| 438 | Amino Acid | Ty1-like NLS A2S7H2-0 |
| 439 | Amino Acid | Ty1-like NLS A3MRV0-0 |
| 440 | Amino Acid | Ty1-like NLS A3NEI3-0 |
| 441 | Amino Acid | Ty1-like NLS A3P0B7-0 |
| 442 | Amino Acid | Ty1-like NLS A4JAN6-0 |
| 443 | Amino Acid | Ty1-like NLS A4SUV7-0 |
| 444 | Amino Acid | Ty1-like NLS A5FP03-0 |
| 445 | Amino Acid | Ty1-like NLS A5ILZ2-0 |
| 446 | Amino Acid | Ty1-like NLS A6GY20-0 |
| 447 | Amino Acid | Ty1-like NLS A6LLI5-0 |
| 448 | Amino Acid | Ty1-like NLS A6LQX4-0 |
| 449 | Amino Acid | Ty1-like NLS A8F6X2-0 |
| 450 | Amino Acid | Ty1-like NLS A8G6B7-0 |
| 451 | Amino Acid | Ty1-like NLS A9ADI9-0 |
| 452 | Amino Acid | Ty1-like NLS A9IJ08-0 |
| 453 | Amino Acid | Ty1-like NLS A9IXA1-0 |
| 454 | Amino Acid | Ty1-like NLS A9NEN2-0 |
| 455 | Amino Acid | Ty1-like NLS B0S140-0 |
| 456 | Amino Acid | Ty1-like NLS B1JU18-0 |
| 457 | Amino Acid | Ty1-like NLS B1LBA1-0 |
| 458 | Amino Acid | Ty1-like NLS B1W354-0 |
| 459 | Amino Acid | Ty1-like NLS B1XSP7-0 |
| 460 | Amino Acid | Ty1-like NLS B1YRC6-0 |
| 461 | Amino Acid | Ty1-like NLS B2JIH0-0 |
| 462 | Amino Acid | Ty1-like NLS B2T755-0 |
| 463 | Amino Acid | Ty1-like NLS B2UEM3-0 |
| 464 | Amino Acid | Ty1-like NLS B3PLU0-0 |
| 465 | Amino Acid | Ty1-like NLS B3R7T2-0 |
| 466 | Amino Acid | Ty1-like NLS B4E5B6-0 |
| 467 | Amino Acid | Ty1-like NLS B4S3C9-0 |
| 468 | Amino Acid | Ty1-like NLS B7IHT4-0 |
| 469 | Amino Acid | Ty1-like NLS B8E0X6-0 |
| 470 | Amino Acid | Ty1-like NLS B9K7W0-0 |
| 471 | Amino Acid | Ty1-like NLS C1A494-0 |
| 472 | Amino Acid | Ty1-like NLS C5CE41-0 |
| 473 | Amino Acid | Ty1-like NLS O88058-0 |
| 474 | Amino Acid | Ty1-like NLS P0DG92-0 |
| 475 | Amino Acid | Ty1-like NLS P0DG93-0 |
| 476 | Amino Acid | Ty1-like NLS P60554-0 |
| 477 | Amino Acid | Ty1-like NLS P67354-0 |
| 478 | Amino Acid | Ty1-like NLS P75311-0 |
| 479 | Amino Acid | Ty1-like NLS P75471-0 |
| 480 | Amino Acid | Ty1-like NLS P94372-0 |
| 481 | Amino Acid | Ty1-like NLS Q056Y0-0 |
| 482 | Amino Acid | Ty1-like NLS Q057D7-0 |
| 483 | Amino Acid | Ty1-like NLS Q0AYB7-0 |
| 484 | Amino Acid | Ty1-like NLS Q0BJ50-0 |
| 485 | Amino Acid | Ty1-like NLS Q0K610-0 |
| 486 | Amino Acid | Ty1-like NLS Q0STA4-0 |
| 487 | Amino Acid | Ty1-like NLS Q0STL9-0 |
| 488 | Amino Acid | Ty1-like NLS Q0TQV7-0 |
| 489 | Amino Acid | Ty1-like NLS Q0TR88-0 |
| 490 | Amino Acid | Ty1-like NLS Q12GX5-0 |
| 491 | Amino Acid | Ty1-like NLS Q13TG6-0 |
| 492 | Amino Acid | Ty1-like NLS Q1AWG1-0 |
| 493 | Amino Acid | Ty1-like NLS Q1BRU4-0 |
| 494 | Amino Acid | Ty1-like NLS Q1J5X5-0 |
| 495 | Amino Acid | Ty1-like NLS Q1JAY8-0 |
| 496 | Amino Acid | Ty1-like NLS QIJG57-0 |
| 497 | Amino Acid | Ty1-like NLS Q1JL34-0 |
| 498 | Amino Acid | Ty1-like NLS Q1LI28-0 |
| 499 | Amino Acid | Ty1-like NLS Q2L2H3-0 |
| 500 | Amino Acid | Ty1-like NLS Q2NIH1-0 |
| 501 | Amino Acid | Ty1-like NLS Q2SU23-0 |
| 502 | Amino Acid | Ty1-like NLS Q39KH1-0 |
| 503 | Amino Acid | Ty1-like NLS Q3JMQ8-0 |
| 504 | Amino Acid | Ty1-like NLS Q3YRL8-0 |
| 505 | Amino Acid | Ty1-like NLS Q46WD9-0 |
| 506 | Amino Acid | Ty1-like NLS Q48SQ4-0 |
| 507 | Amino Acid | Ty1-like NLS Q49418-0 |
| 508 | Amino Acid | Ty1-like NLS Q56307-0 |
| 509 | Amino Acid | Ty1-like NLS Q5LEQ4-0 |
| 510 | Amino Acid | Ty1-like NLS Q5WEJ7-0 |
| 511 | Amino Acid | Ty1-like NLS Q5XBA0-0 |
| 512 | Amino Acid | Ty1-like NLS Q62GK1-0 |
| 513 | Amino Acid | Ty1-like NLS Q63Q07-0 |
| 514 | Amino Acid | Ty1-like NLS Q64VP0-0 |
| 515 | Amino Acid | Ty1-like NLS Q6G3V1-0 |
| 516 | Amino Acid | Ty1-like NLS Q6G5M0-0 |
| 517 | Amino Acid | Ty1-like NLS Q6LLQ8-0 |
| 518 | Amino Acid | Ty1-like NLS Q6MDC1-0 |
| 519 | Amino Acid | Ty1-like NLS Q6MDH4-0 |
| 520 | Amino Acid | Ty1-like NLS Q6ME08-0 |
| 521 | Amino Acid | Ty1-like NLS Q73PH4-0 |
| 522 | Amino Acid | Ty1-like NLS Q7MAD1-0 |
| 523 | Amino Acid | Ty1-like NLS Q7UP72-0 |
| 524 | Amino Acid | Ty1-like NLS Q7VTD6-0 |
| 525 | Amino Acid | Ty1-like NLS Q7W2F9-0 |
| 526 | Amino Acid | Ty1-like NLS Q7WRC8-0 |
| 527 | Amino Acid | Ty1-like NLS Q828D0-0 |
| 528 | Amino Acid | Ty1-like NLS Q895M9-0 |
| 529 | Amino Acid | Ty1-like NLS Q8AAP0-0 |
| 530 | Amino Acid | Ty1-like NLS Q8D1X2-0 |
| 531 | Amino Acid | Ty1-like NLS Q8K908-0 |
| 532 | Amino Acid | Ty1-like NLS Q8P0C9-0 |
| 533 | Amino Acid | Ty1-like NLS Q8XKR1-0 |
| 534 | Amino Acid | Ty1-like NLS Q8XL46-0 |
| 535 | Amino Acid | Ty1-like NLS Q8XV09-0 |
| 536 | Amino Acid | Ty1-like NLS Q93Q47-0 |
| 537 | Amino Acid | Ty1-like NLS Q9L0Q6-0 |
| 538 | Amino Acid | Ty1-like NLS Q9L0Q6-1 |
| 539 | Amino Acid | Ty1-like NLS Q9L0Q6-2 |
| 540 | Amino Acid | Ty1-like NLS Q9L0Q6-3 |
| 541 | Amino Acid | Ty1-like NLS Q9L0Q6-4 |
| 542 | Amino Acid | Ty1-like NLS Q9L0Q6-5 |
| 543 | Amino Acid | Ty1-like NLS Q9L0Q6-6 |
| 544 | Amino Acid | Ty1-like NLS Q9X1S8-0 |
| 545 | Amino Acid | Ty1-like NLS A1CNV8-0 |
| 546 | Amino Acid | Ty1-like NLS A1D1R8-0 |
| 547 | Amino Acid | Ty1-like NLS A1D731-0 |
| 548 | Amino Acid | Ty1-like NLS A2QAX7-0 |
| 549 | Amino Acid | Ty1-like NLS A3LQ55-0 |
| 550 | Amino Acid | Ty1-like NLS A5DGY0-0 |
| 551 | Amino Acid | Ty1-like NLS A5DKW3-0 |
| 552 | Amino Acid | Ty1-like NLS A5DLG8-0 |
| 553 | Amino Acid | Ty1-like NLS A5DY34-0 |
| 554 | Amino Acid | Ty1-like NLS A6RBB0-0 |
| 555 | Amino Acid | Ty1-like NLS A6RMZ2-0 |
| 556 | Amino Acid | Ty1-like NLS A6ZL85-0 |
| 557 | Amino Acid | Ty1-like NLS A6ZZJ1-0 |
| 558 | Amino Acid | Ty1-like NLS A7E4K0-0 |
| 559 | Amino Acid | Ty1-like NLS G0S8I1-0 |
| 560 | Amino Acid | Ty1-like NLS O13527-0 |
| 561 | Amino Acid | Ty1-like NLS O13535-0 |
| 562 | Amino Acid | Ty1-like NLS O13658-0 |
| 563 | Amino Acid | Ty1-like NLS O14064-0 |
| 564 | Amino Acid | Ty1-like NLS O14076-0 |
| 565 | Amino Acid | Ty1-like NLS O42668-0 |
| 566 | Amino Acid | Ty1-like NLS O43068-0 |
| 567 | Amino Acid | Ty1-like NLS O74777-0 |
| 568 | Amino Acid | Ty1-like NLS O74862-0 |
| 569 | Amino Acid | Ty1-like NLS O94383-0 |
| 570 | Amino Acid | Ty1-like NLS O94487-0 |
| 571 | Amino Acid | Ty1-like NLS O94585-0 |
| 572 | Amino Acid | Ty1-like NLS O94652-0 |
| 573 | Amino Acid | Ty1-like NLS P0C2I2-0 |
| 574 | Amino Acid | Ty1-like NLS P0C2I3-0 |
| 575 | Amino Acid | Ty1-like NLS P0C2I5-0 |
| 576 | Amino Acid | Ty1-like NLS P0C2I6-0 |
| 577 | Amino Acid | Ty1-like NLS P0C2I7-0 |
| 578 | Amino Acid | Ty1-like NLS P0C2I9-0 |
| 579 | Amino Acid | Ty1-like NLS P0C2J0-0 |
| 580 | Amino Acid | Ty1-like NLS P0C2J1-0 |
| 581 | Amino Acid | Ty1-like NLS P0C2J3-0 |
| 582 | Amino Acid | Ty1-like NLS P0C2J5-0 |
| 583 | Amino Acid | Ty1-like NLS P0CM98-0 |
| 584 | Amino Acid | Ty1-like NLS P0CM99-0 |
| 585 | Amino Acid | Ty1-like NLS P0CX63-0 |
| 586 | Amino Acid | Ty1-like NLS P0CX64-0 |
| 587 | Amino Acid | Ty1-like NLS P13902-0 |
| 588 | Amino Acid | Ty1-like NLS P14746-0 |
| 589 | Amino Acid | Ty1-like NLS P20484-0 |
| 590 | Amino Acid | Ty1-like NLS P22936-0 |
| 591 | Amino Acid | Ty1-like NLS P25384-0 |
| 592 | Amino Acid | Ty1-like NLS P32597-0 |
| 593 | Amino Acid | Ty1-like NLS P36006-0 |
| 594 | Amino Acid | Ty1-like NLS P36080-0 |
| 595 | Amino Acid | Ty1-like NLS P38112-0 |
| 596 | Amino Acid | Ty1-like NLS P47098-0 |
| 597 | Amino Acid | Ty1-like NLS P47100-0 |
| 598 | Amino Acid | Ty1-like NLS P51599-0 |
| 599 | Amino Acid | Ty1-like NLS P53119-0 |
| 600 | Amino Acid | Ty1-like NLS P53123-0 |
| 601 | Amino Acid | Ty1-like NLS P53125-0 |
| 602 | Amino Acid | Ty1-like NLS Q01301-0 |
| 603 | Amino Acid | Ty1-like NLS Q03434-0 |
| 604 | Amino Acid | Ty1-like NLS Q03494-0 |
| 605 | Amino Acid | Ty1-like NLS Q03612-0 |
| 606 | Amino Acid | Ty1-like NLS Q03619-0 |
| 607 | Amino Acid | Ty1-like NLS Q03707-0 |
| 608 | Amino Acid | Ty1-like NLS Q03855-0 |
| 609 | Amino Acid | Ty1-like NLS Q04214-0 |
| 610 | Amino Acid | Ty1-like NLS Q04500-0 |
| 611 | Amino Acid | Ty1-like NLS Q04670-0 |
| 612 | Amino Acid | Ty1-like NLS Q04711-0 |
| 613 | Amino Acid | Ty1-like NLS Q06132-0 |
| 614 | Amino Acid | Ty1-like NLS Q07163-0 |
| 615 | Amino Acid | Ty1-like NLS Q07509-0 |
| 616 | Amino Acid | Ty1-like NLS Q07791-0 |
| 617 | Amino Acid | Ty1-like NLS Q07793-0 |
| 618 | Amino Acid | Ty1-like NLS Q09094-0 |
| 619 | Amino Acid | Ty1-like NLS Q09180-0 |
| 620 | Amino Acid | Ty1-like NLS Q09180-1 |
| 621 | Amino Acid | Ty1-like NLS Q09180-2 |
| 622 | Amino Acid | Ty1-like NLS Q09863-0 |
| 623 | Amino Acid | Ty1-like NLS Q0U8V9-0 |
| 624 | Amino Acid | Ty1-like NLS Q12088-0 |
| 625 | Amino Acid | Ty1-like NLS Q12112-0 |
| 626 | Amino Acid | Ty1-like NLS Q12113-0 |
| 627 | Amino Acid | Ty1-like NLS Q12141-0 |
| 628 | Amino Acid | Ty1-like NLS Q12193-0 |
| 629 | Amino Acid | Ty1-like NLS Q12269-0 |
| 630 | Amino Acid | Ty1-like NLS Q12273-0 |
| 631 | Amino Acid | Ty1-like NLS Q12316-0 |
| 632 | Amino Acid | Ty1-like NLS Q12337-0 |
| 633 | Amino Acid | Ty1-like NLS Q12339-0 |
| 634 | Amino Acid | Ty1-like NLS Q12414-0 |
| 635 | Amino Acid | Ty1-like NLS Q12472-0 |
| 636 | Amino Acid | Ty1-like NLS Q12490-0 |
| 637 | Amino Acid | Ty1-like NLS Q12491-0 |
| 638 | Amino Acid | Ty1-like NLS Q12501-0 |
| 639 | Amino Acid | Ty1-like NLS Q1DNW5-0 |
| 640 | Amino Acid | Ty1-like NLS Q1EA54-0 |
| 641 | Amino Acid | Ty1-like NLS Q2HFA6-0 |
| 642 | Amino Acid | Ty1-like NLS Q2HFA6-1 |
| 643 | Amino Acid | Ty1-like NLS Q2UQI6-0 |
| 644 | Amino Acid | Ty1-like NLS Q4HZ42-0 |
| 645 | Amino Acid | Ty1-like NLS Q4P6I3-0 |
| 646 | Amino Acid | Ty1-like NLS Q4WHF8-0 |
| 647 | Amino Acid | Ty1-like NLS Q4WRV2-0 |
| 648 | Amino Acid | Ty1-like NLS Q4WXQ7-0 |
| 649 | Amino Acid | Ty1-like NLS Q5A2K0-0 |
| 650 | Amino Acid | Ty1-like NLS Q5A310-0 |
| 651 | Amino Acid | Ty1-like NLS Q5ACW8-0 |
| 652 | Amino Acid | Ty1-like NLS Q5B6K3-0 |
| 653 | Amino Acid | Ty1-like NLS Q6BXL7-0 |
| 654 | Amino Acid | Ty1-like NLS Q6C1L3-0 |
| 655 | Amino Acid | Ty1-like NLS Q6C233-0 |
| 656 | Amino Acid | Ty1-like NLS Q6C2J1-0 |
| 657 | Amino Acid | Ty1-like NLS Q6C7C0-0 |
| 658 | Amino Acid | Ty1-like NLS Q6CJY0-0 |
| 659 | Amino Acid | Ty1-like NLS Q6CJY0-1 |
| 660 | Amino Acid | Ty1-like NLS Q6FML5-0 |
| 661 | Amino Acid | Ty1-like NLS Q75F02-0 |
| 662 | Amino Acid | Ty1-like NLS Q7S2A9-0 |
| 663 | Amino Acid | Ty1-like NLS Q7S9J4-0 |
| 664 | Amino Acid | Ty1-like NLS Q7SFJ3-0 |
| 665 | Amino Acid | Ty1-like NLS Q875K1-0 |
| 666 | Amino Acid | Ty1-like NLS Q8SUT1-0 |
| 667 | Amino Acid | Ty1-like NLS Q8SVI7-0 |
| 668 | Amino Acid | Ty1-like NLS Q8SVI7-1 |
| 669 | Amino Acid | Ty1-like NLS Q92393-0 |
| 670 | Amino Acid | Ty1-like NLS Q99109-0 |
| 671 | Amino Acid | Ty1-like NLS Q99231-0 |
| 672 | Amino Acid | Ty1-like NLS Q99337-0 |
| 673 | Amino Acid | Ty1-like NLS Q9USK2-0 |
| 674 | Amino Acid | Ty1-like NLS Q9UTQ5-0 |
| 675 | Amino Acid | Ty1-like NLS A7MD48-0 |
| 676 | Amino Acid | Ty1-like NLS O15446-0 |
| 677 | Amino Acid | Ty1-like NLS O15446-1 |
| 678 | Amino Acid | Ty1-like NLS O15446-2 |
| 679 | Amino Acid | Ty1-like NLS O43148-0 |
| 680 | Amino Acid | Ty1-like NLS O60271-0 |
| 681 | Amino Acid | Ty1-like NLS O75128-0 |
| 682 | Amino Acid | Ty1-like NLS O75400-0 |
| 683 | Amino Acid | Ty1-like NLS O75691-0 |
| 684 | Amino Acid | Ty1-like NLS O75937-0 |
| 685 | Amino Acid | Ty1-like NLS O76021-0 |
| 686 | Amino Acid | Ty1-like NLS O94964-0 |
| 687 | Amino Acid | Ty1-like NLS P23497-0 |
| 688 | Amino Acid | Ty1-like NLS P30414-0 |
| 689 | Amino Acid | Ty1-like NLS P42081-0 |
| 690 | Amino Acid | Ty1-like NLS P46100-0 |
| 691 | Amino Acid | Ty1-like NLS P51608-0 |
| 692 | Amino Acid | Ty1-like NLS P59797-0 |
| 693 | Amino Acid | Ty1-like NLS P82979-0 |
| 694 | Amino Acid | Ty1-like NLS Q12830-0 |
| 695 | Amino Acid | Ty1-like NLS Q13409-0 |
| 696 | Amino Acid | Ty1-like NLS Q13427-0 |
| 697 | Amino Acid | Ty1-like NLS Q15361-0 |
| 698 | Amino Acid | Ty1-like NLS Q15361-1 |
| 699 | Amino Acid | Ty1-like NLS Q53SF7-0 |
| 700 | Amino Acid | Ty1-like NLS Q5M9Q1-0 |
| 701 | Amino Acid | Ty1-like NLS Q5T3I0-0 |
| 702 | Amino Acid | Ty1-like NLS Q5T3I0-1 |
| 703 | Amino Acid | Ty1-like NLS Q68D10-0 |
| 704 | Amino Acid | Ty1-like NLS Q6IPR3-0 |
| 705 | Amino Acid | Ty1-like NLS Q6PD62-0 |
| 706 | Amino Acid | Ty1-like NLS Q6PD62-1 |
| 707 | Amino Acid | Ty1-like NLS Q6PD62-2 |
| 708 | Amino Acid | Ty1-like NLS Q6S8J7-0 |
| 709 | Amino Acid | Ty1-like NLS Q6ZU65-0 |
| 710 | Amino Acid | Ty1-like NLS Q7Z7B0-0 |
| 711 | Amino Acid | Ty1-like NLS Q8N9E0-0 |
| 712 | Amino Acid | Ty1-like NLS Q8NCU4-0 |
| 713 | Amino Acid | Ty1-like NLS Q8NFU7-0 |
| 714 | Amino Acid | Ty1-like NLS Q96DY2-0 |
| 715 | Amino Acid | Ty1-like NLS Q96GD3-0 |
| 716 | Amino Acid | Ty1-like NLS Q96P65-0 |
| 717 | Amino Acid | Ty1-like NLS Q96QC0-0 |
| 718 | Amino Acid | Ty1-like NLS Q9BQG0-0 |
| 719 | Amino Acid | Ty1-like NLS Q9BQG0-1 |
| 720 | Amino Acid | Ty1-like NLS Q9BRU9-0 |
| 721 | Amino Acid | Ty1-like NLS Q9H0S4-0 |
| 722 | Amino Acid | Ty1-like NLS Q9H6F5-0 |
| 723 | Amino Acid | Ty1-like NLS Q9HCK1-0 |
| 724 | Amino Acid | Ty1-like NLS Q9HCK8-0 |
| 725 | Amino Acid | Ty1-like NLS Q9NPI1-0 |
| 726 | Amino Acid | Ty1-like NLS Q9NSV4-0 |
| 727 | Amino Acid | Ty1-like NLS Q9NUL3-0 |
| 728 | Amino Acid | Ty1-like NLS Q9NWT1-0 |
| 729 | Amino Acid | Ty1-like NLS Q9NX58-0 |
| 730 | Amino Acid | Ty1-like NLS Q9UGU5-0 |
| 731 | Amino Acid | Ty1-like NLS Q9UNS1-0 |
| 732 | Amino Acid | Ty1-like NLS Q9Y2X3-0 |
| 733 | Amino Acid | Ty1-like NLS Q9Y6X0-0 |
| 734 | Amino Acid | Ty1-like NLS A0A1I8M2I8-0 |
| 735 | Amino Acid | Ty1-like NLS A1XDC0-0 |
| 736 | Amino Acid | Ty1-like NLS A7S6A5-0 |
| 737 | Amino Acid | Ty1-like NLS A8XI07-0 |
| 738 | Amino Acid | Ty1-like NLS A8XI07-1 |
| 739 | Amino Acid | Ty1-like NLS C0HKU9-0 |
| 740 | Amino Acid | Ty1-like NLS C6KTD2-0 |
| 741 | Amino Acid | Ty1-like NLS O16140-0 |
| 742 | Amino Acid | Ty1-like NLS O17828-0 |
| 743 | Amino Acid | Ty1-like NLS O17966-0 |
| 744 | Amino Acid | Ty1-like NLS O44410-0 |
| 745 | Amino Acid | Ty1-like NLS O44410-1 |
| 746 | Amino Acid | Ty1-like NLS O45244-0 |
| 747 | Amino Acid | Ty1-like NLS P0DP78-0 |
| 748 | Amino Acid | Ty1-like NLS P0DP78-1 |
| 749 | Amino Acid | Ty1-like NLS P0DP79-0 |
| 750 | Amino Acid | Ty1-like NLS P0DP79-1 |
| 751 | Amino Acid | Ty1-like NLS P0DP80-0 |
| 752 | Amino Acid | Ty1-like NLS P0DP80-1 |
| 753 | Amino Acid | Ty1-like NLS P0DP81-0 |
| 754 | Amino Acid | Ty1-like NLS P0DP81-1 |
| 755 | Amino Acid | Ty1-like NLS P14196-0 |
| 756 | Amino Acid | Ty1-like NLS P22058-0 |
| 757 | Amino Acid | Ty1-like NLS P26023-0 |
| 758 | Amino Acid | Ty1-like NLS P26991-0 |
| 759 | Amino Acid | Ty1-like NLS P35978-0 |
| 760 | Amino Acid | Ty1-like NLS P46758-0 |
| 761 | Amino Acid | Ty1-like NLS P46758-1 |
| 762 | Amino Acid | Ty1-like NLS P46867-0 |
| 763 | Amino Acid | Ty1-like NLS P54644-0 |
| 764 | Amino Acid | Ty1-like NLS P54812-0 |
| 765 | Amino Acid | Ty1-like NLS P83212-0 |
| 766 | Amino Acid | Ty1-like NLS Q04621-0 |
| 767 | Amino Acid | Ty1-like NLS Q08696-0 |
| 768 | Amino Acid | Ty1-like NLS Q08696-1 |
| 769 | Amino Acid | Ty1-like NLS Q08696-2 |
| 770 | Amino Acid | Ty1-like NLS Q08696-3 |
| 771 | Amino Acid | Ty1-like NLS Q08696-4 |
| 772 | Amino Acid | Ty1-like NLS Q08696-5 |
| 773 | Amino Acid | Ty1-like NLS Q08696-6 |
| 774 | Amino Acid | Ty1-like NLS Q09223-0 |
| 775 | Amino Acid | Ty1-like NLS Q09595-0 |
| 776 | Amino Acid | Ty1-like NLS Q1ELU8-0 |
| 777 | Amino Acid | Ty1-like NLS Q23120-0 |
| 778 | Amino Acid | Ty1-like NLS Q23272-0 |
| 779 | Amino Acid | Ty1-like NLS Q24537-0 |
| 780 | Amino Acid | Ty1-like NLS Q27450-0 |
| 781 | Amino Acid | Ty1-like NLS Q29DY1-0 |
| 782 | Amino Acid | Ty1-like NLS Q4N4T9-0 |
| 783 | Amino Acid | Ty1-like NLS Q54QQ2-0 |
| 784 | Amino Acid | Ty1-like NLS Q54QQ2-1 |
| 785 | Amino Acid | Ty1-like NLS Q54S20-0 |
| 786 | Amino Acid | Ty1-like NLS Q54US6-0 |
| 787 | Amino Acid | Ty1-like NLS Q54VU4-0 |
| 788 | Amino Acid | Ty1-like NLS Q54XP6-0 |
| 789 | Amino Acid | Ty1-like NLS Q551H0-0 |
| 790 | Amino Acid | Ty1-like NLS Q557G1-0 |
| 791 | Amino Acid | Ty1-like NLS Q55CE0-0 |
| 792 | Amino Acid | Ty1-like NLS Q61R02-0 |
| 793 | Amino Acid | Ty1-like NLS Q75JP5-0 |
| 794 | Amino Acid | Ty1-like NLS Q8I5P7-0 |
| 795 | Amino Acid | Ty1-like NLS Q8I5P7-1 |
| 796 | Amino Acid | Ty1-like NLS Q8IBP1-0 |
| 797 | Amino Acid | Ty1-like NLS Q8ILR9-0 |
| 798 | Amino Acid | Ty1-like NLS Q93591-0 |
| 799 | Amino Acid | Ty1-like NLS Q95Y36-0 |
| 800 | Amino Acid | Ty1-like NLS Q9NBL2-0 |
| 801 | Amino Acid | Ty1-like NLS Q9NDE8-0 |
| 802 | Amino Acid | Ty1-like NLS Q9NDE8-1 |
| 803 | Amino Acid | Ty1-like NLS Q9NDE8-2 |
| 804 | Amino Acid | Ty1-like NLS Q9V5P6-0 |
| 805 | Amino Acid | Ty1-like NLS Q9VDS6-0 |
| 806 | Amino Acid | Ty1-like NLS Q9VGW1-0 |
| 807 | Amino Acid | Ty1-like NLS Q9VH89-0 |
| 808 | Amino Acid | Ty1-like NLS Q9VKM6-0 |
| 809 | Amino Acid | Ty1-like NLS Q9VNH1-0 |
| 810 | Amino Acid | Ty1-like NLS Q9W261-0 |
| 811 | Amino Acid | Ty1-like NLS E1B7L7-0 |
| 812 | Amino Acid | Ty1-like NLS Q08DU1-0 |
| 813 | Amino Acid | Ty1-like NLS Q0III3-0 |
| 814 | Amino Acid | Ty1-like NLS Q17QH9-0 |
| 815 | Amino Acid | Ty1-like NLS Q29S22-0 |
| 816 | Amino Acid | Ty1-like NLS Q2KIQ2-0 |
| 817 | Amino Acid | Ty1-like NLS Q2KJE1-0 |
| 818 | Amino Acid | Ty1-like NLS Q2KJE1-1 |
| 819 | Amino Acid | Ty1-like NLS Q2TBX7-0 |
| 820 | Amino Acid | Ty1-like NLS Q4R7K1-0 |
| 821 | Amino Acid | Ty1-like NLS Q4R8Y5-0 |
| 822 | Amino Acid | Ty1-like NLS Q58DE2-0 |
| 823 | Amino Acid | Ty1-like NLS Q58DU0-0 |
| 824 | Amino Acid | Ty1-like NLS Q5E9U4-0 |
| 825 | Amino Acid | Ty1-like NLS Q5NVM2-0 |
| 826 | Amino Acid | Ty1-like NLS Q5R4V4-0 |
| 827 | Amino Acid | Ty1-like NLS Q5R8B0-0 |
| 828 | Amino Acid | Ty1-like NLS Q5RB69-0 |
| 829 | Amino Acid | Ty1-like NLS Q5RCE6-0 |
| 830 | Amino Acid | Ty1-like NLS Q5TM61-0 |
| 831 | Amino Acid | Ty1-like NLS Q767K9-0 |
| 832 | Amino Acid | Ty1-like NLS Q7YQM3-0 |
| 833 | Amino Acid | Ty1-like NLS Q7YQM4-0 |
| 834 | Amino Acid | Ty1-like NLS Q7YR38-0 |
| 835 | Amino Acid | Ty1-like NLS Q95KD7-0 |
| 836 | Amino Acid | Ty1-like NLS Q95LG8-0 |
| 837 | Amino Acid | Ty1-like NLS Q9N1Q7-0 |
| 838 | Amino Acid | Ty1-like NLS A2WSD3-0 |
| 839 | Amino Acid | Ty1-like NLS A2XVF7-0 |
| 840 | Amino Acid | Ty1-like NLS A2XVF7-1 |
| 841 | Amino Acid | Ty1-like NLS A2XVF7-2 |
| 842 | Amino Acid | Ty1-like NLS A2XVF7-3 |
| 843 | Amino Acid | Ty1-like NLS A3AVH5-0 |
| 844 | Amino Acid | Ty1-like NLS A3AVH5-1 |
| 845 | Amino Acid | Ty1-like NLS A3AVH5-2 |
| 846 | Amino Acid | Ty1-like NLS A3AVH5-3 |
| 847 | Amino Acid | Ty1-like NLS A4QJZ0-0 |
| 848 | Amino Acid | Ty1-like NLS A4QK78-0 |
| 849 | Amino Acid | Ty1-like NLS A4QKG5-0 |
| 850 | Amino Acid | Ty1-like NLS A4QKQ3-0 |
| 851 | Amino Acid | Ty1-like NLS A6MN03-0 |
| 852 | Amino Acid | Ty1-like NLS A8MS85-0 |
| 853 | Amino Acid | Ty1-like NLS A9XMT3-0 |
| 854 | Amino Acid | Ty1-like NLS B8YIE8-0 |
| 855 | Amino Acid | Ty1-like NLS F4HVZ5-0 |
| 856 | Amino Acid | Ty1-like NLS F4IQK5-0 |
| 857 | Amino Acid | Ty1-like NLS F4IQK5-1 |
| 858 | Amino Acid | Ty1-like NLS O22812-0 |
| 859 | Amino Acid | Ty1-like NLS O49323-0 |
| 860 | Amino Acid | Ty1-like NLS O64571-0 |
| 861 | Amino Acid | Ty1-like NLS O64639-0 |
| 862 | Amino Acid | Ty1-like NLS O64639-1 |
| 863 | Amino Acid | Ty1-like NLS O64639-2 |
| 864 | Amino Acid | Ty1-like NLS O65743-0 |
| 865 | Amino Acid | Ty1-like NLS O81072-0 |
| 866 | Amino Acid | Ty1-like NLS P09975-0 |
| 867 | Amino Acid | Ty1-like NLS P0C262-0 |
| 868 | Amino Acid | Ty1-like NLS P29345-0 |
| 869 | Amino Acid | Ty1-like NLS P50888-0 |
| 870 | Amino Acid | Ty1-like NLS P51269-0 |
| 871 | Amino Acid | Ty1-like NLS P51430-0 |
| 872 | Amino Acid | Ty1-like NLS Q06FP6-0 |
| 873 | Amino Acid | Ty1-like NLS Q06FP6-1 |
| 874 | Amino Acid | Ty1-like NLS Q06FP6-2 |
| 875 | Amino Acid | Ty1-like NLS Q06R72-0 |
| 876 | Amino Acid | Ty1-like NLS Q06R98-0 |
| 877 | Amino Acid | Ty1-like NLS Q1KVQ9-0 |
| 878 | Amino Acid | Ty1-like NLS Q1XDL7-0 |
| 879 | Amino Acid | Ty1-like NLS Q38873-0 |
| 880 | Amino Acid | Ty1-like NLS Q3E8X3-0 |
| 881 | Amino Acid | Ty1-like NLS Q3ZJ77-0 |
| 882 | Amino Acid | Ty1-like NLS Q42438-0 |
| 883 | Amino Acid | Ty1-like NLS Q4V3E0-0 |
| 884 | Amino Acid | Ty1-like NLS Q66GN2-0 |
| 885 | Amino Acid | Ty1-like NLS Q6K5K2-0 |
| 886 | Amino Acid | Ty1-like NLS Q6YS30-0 |
| 887 | Amino Acid | Ty1-like NLS Q84WK0-0 |
| 888 | Amino Acid | Ty1-like NLS Q84Y18-0 |
| 889 | Amino Acid | Ty1-like NLS Q8H991-0 |
| 890 | Amino Acid | Ty1-like NLS Q8RWY7-0 |
| 891 | Amino Acid | Ty1-like NLS Q8RWY7-1 |
| 892 | Amino Acid | Ty1-like NLS Q8VZ67-0 |
| 893 | Amino Acid | Ty1-like NLS Q8VZN4-0 |
| 894 | Amino Acid | Ty1-like NLS Q8W0K2-0 |
| 895 | Amino Acid | Ty1-like NLS Q8W490-0 |
| 896 | Amino Acid | Ty1-like NLS Q9CAE4-0 |
| 897 | Amino Acid | Ty1-like NLS Q9FMZ4-0 |
| 898 | Amino Acid | Ty1-like NLS Q9FMZ4-1 |
| 899 | Amino Acid | Ty1-like NLS Q9FRI0-0 |
| 900 | Amino Acid | Ty1-like NLS Q9LKI5-0 |
| 901 | Amino Acid | Ty1-like NLS Q9LUJ5-0 |
| 902 | Amino Acid | Ty1-like NLS Q9LUR0-0 |
| 903 | Amino Acid | Ty1-like NLS Q9LVU8-0 |
| 904 | Amino Acid | Ty1-like NLS Q9LVU8-1 |
| 905 | Amino Acid | Ty1-like NLS Q9LYK7-0 |
| 906 | Amino Acid | Ty1-like NLS Q9M020-0 |
| 907 | Amino Acid | Ty1-like NLS Q9M1L7-0 |
| 908 | Amino Acid | Ty1-like NLS Q9M3V8-0 |
| 909 | Amino Acid | Ty1-like NLS Q9SRQ3-0 |
| 910 | Amino Acid | Ty1-like NLS Q9ZPV5-0 |
| 911 | Amino Acid | Ty1-like NLS B1AQJ2-0 |
| 912 | Amino Acid | Ty1-like NLS D3ZUI5-0 |
| 913 | Amino Acid | Ty1-like NLS D4A666-0 |
| 914 | Amino Acid | Ty1-like NLS E1U8D0-0 |
| 915 | Amino Acid | Ty1-like NLS G3V8T1-0 |
| 916 | Amino Acid | Ty1-like NLS O35821-0 |
| 917 | Amino Acid | Ty1-like NLS O88487-0 |
| 918 | Amino Acid | Ty1-like NLS O88665-0 |
| 919 | Amino Acid | Ty1-like NLS P61364-0 |
| 920 | Amino Acid | Ty1-like NLS P61365-0 |
| 921 | Amino Acid | Ty1-like NLS P83858-0 |
| 922 | Amino Acid | Ty1-like NLS P83861-0 |
| 923 | Amino Acid | Ty1-like NLS Q00566-0 |
| 924 | Amino Acid | Ty1-like NLS Q05CL8-0 |
| 925 | Amino Acid | Ty1-like NLS Q09XV5-0 |
| 926 | Amino Acid | Ty1-like NLS Q3TFK5-0 |
| 927 | Amino Acid | Ty1-like NLS Q3TFK5-1 |
| 928 | Amino Acid | Ty1-like NLS Q3TFK5-2 |
| 929 | Amino Acid | Ty1-like NLS Q3TYA6-0 |
| 930 | Amino Acid | Ty1-like NLS Q3UMF0-0 |
| 931 | Amino Acid | Ty1-like NLS Q498U4-0 |
| 932 | Amino Acid | Ty1-like NLS Q4V7C4-0 |
| 933 | Amino Acid | Ty1-like NLS Q4V8G7-0 |
| 934 | Amino Acid | Ty1-like NLS Q505I5-0 |
| 935 | Amino Acid | Ty1-like NLS Q562C7-0 |
| 936 | Amino Acid | Ty1-like NLS Q566R3-0 |
| 937 | Amino Acid | Ty1-like NLS Q566R3-1 |
| 938 | Amino Acid | Ty1-like NLS Q566R3-2 |
| 939 | Amino Acid | Ty1-like NLS Q58A65-0 |
| 940 | Amino Acid | Ty1-like NLS Q5NBX1-0 |
| 941 | Amino Acid | Ty1-like NLS Q5XG71-0 |
| 942 | Amino Acid | Ty1-like NLS Q5XI01-0 |
| 943 | Amino Acid | Ty1-like NLS Q5XIB5-0 |
| 944 | Amino Acid | Ty1-like NLS Q5XIR6-0 |
| 945 | Amino Acid | Ty1-like NLS Q60848-0 |
| 946 | Amino Acid | Ty1-like NLS Q62018-0 |
| 947 | Amino Acid | Ty1-like NLS Q62018-1 |
| 948 | Amino Acid | Ty1-like NLS Q62187-0 |
| 949 | Amino Acid | Ty1-like NLS Q62871-0 |
| 950 | Amino Acid | Ty1-like NLS Q63520-0 |
| 951 | Amino Acid | Ty1-like NLS Q642C0-0 |
| 952 | Amino Acid | Ty1-like NLS Q68SB1-0 |
| 953 | Amino Acid | Ty1-like NLS Q6AYK5-0 |
| 954 | Amino Acid | Ty1-like NLS Q6NZB0-0 |
| 955 | Amino Acid | Ty1-like NLS Q76KJ5-0 |
| 956 | Amino Acid | Ty1-like NLS Q76KJ5-1 |
| 957 | Amino Acid | Ty1-like NLS Q76KJ5-2 |
| 958 | Amino Acid | Ty1-like NLS Q78WZ7-0 |
| 959 | Amino Acid | Ty1-like NLS Q78WZ7-1 |
| 960 | Amino Acid | Ty1-like NLS Q7TNB4-0 |
| 961 | Amino Acid | Ty1-like NLS Q7TPV4-0 |
| 962 | Amino Acid | Ty1-like NLS Q80WC1-0 |
| 963 | Amino Acid | Ty1-like NLS Q80Z37-0 |
| 964 | Amino Acid | Ty1-like NLS Q811R2-0 |
| 965 | Amino Acid | Ty1-like NLS Q8BKA3-0 |
| 966 | Amino Acid | Ty1-like NLS Q8CJ67-0 |
| 967 | Amino Acid | Ty1-like NLS Q8K214-0 |
| 968 | Amino Acid | Ty1-like NLS Q8K4T4-0 |
| 969 | Amino Acid | Ty1-like NLS Q8R5F3-0 |
| 970 | Amino Acid | Ty1-like NLS Q91X13-0 |
| 971 | Amino Acid | Ty1-like NLS Q9CS72-0 |
| 972 | Amino Acid | Ty1-like NLS Q9CVI2-0 |
| 973 | Amino Acid | Ty1-like NLS Q9CWX9-0 |
| 974 | Amino Acid | Ty1-like NLS Q9CZX5-0 |
| 975 | Amino Acid | Ty1-like NLS Q9D1J3-0 |
| 976 | Amino Acid | Ty1-like NLS Q9D3V1-0 |
| 977 | Amino Acid | Ty1-like NLS Q9DBQ9-0 |
| 978 | Amino Acid | Ty1-like NLS Q9JIX5-0 |
| 979 | Amino Acid | Ty1-like NLS Q9JJ80-0 |
| 980 | Amino Acid | Ty1-like NLS Q9JJ89-0 |
| 981 | Amino Acid | Ty1-like NLS Q9R1C7-0 |
| 982 | Amino Acid | Ty1-like NLS Q9R1X4-0 |
| 983 | Amino Acid | Ty1-like NLS Q9Z180-0 |
| 984 | Amino Acid | Ty1-like NLS Q9Z207-0 |
| 985 | Amino Acid | Ty1-like NLS Q9Z2D6-0 |
| 986 | Amino Acid | Ty1-like NLS A0A1L8GSA2-0 |
| 987 | Amino Acid | Ty1-like NLS A0JP82-0 |
| 988 | Amino Acid | Ty1-like NLS A1A5I1-0 |
| 989 | Amino Acid | Ty1-like NLS A1L2T6-0 |
| 990 | Amino Acid | Ty1-like NLS A2RUV0-0 |
| 991 | Amino Acid | Ty1-like NLS A9JRD8-0 |
| 992 | Amino Acid | Ty1-like NLS E7F568-0 |
| 993 | Amino Acid | Ty1-like NLS F1QFU0-0 |
| 994 | Amino Acid | Ty1-like NLS F1QWK4-0 |
| 995 | Amino Acid | Ty1-like NLS K9JHZ4-0 |
| 996 | Amino Acid | Ty1-like NLS P07193-0 |
| 997 | Amino Acid | Ty1-like NLS P0CB65-0 |
| 998 | Amino Acid | Ty1-like NLS P12957-0 |
| 999 | Amino Acid | Ty1-like NLS P13505-0 |
| 1000 | Amino Acid | Ty1-like NLS P21783-0 |
| 1001 | Amino Acid | Ty1-like NLS Q28BS0-0 |
| 1002 | Amino Acid | Ty1-like NLS Q28BS0-1 |
| 1003 | Amino Acid | Ty1-like NLS Q28G05-0 |
| 1004 | Amino Acid | Ty1-like NLS Q32N87-0 |
| 1005 | Amino Acid | Ty1-like NLS Q3KPW4-0 |
| 1006 | Amino Acid | Ty1-like NLS Q4QR29-0 |
| 1007 | Amino Acid | Ty1-like NLS Q4QR29-1 |
| 1008 | Amino Acid | Ty1-like NLS Q5BL56-0 |
| 1009 | Amino Acid | Ty1-like NLS Q5XJK9-0 |
| 1010 | Amino Acid | Ty1-like NLS Q5ZIJ0-0 |
| 1011 | Amino Acid | Ty1-like NLS Q640I9-0 |
| 1012 | Amino Acid | Ty1-like NLS Q6DEU9-0 |
| 1013 | Amino Acid | Ty1-like NLS Q6DEU9-1 |
| 1014 | Amino Acid | Ty1-like NLS Q6DEU9-2 |
| 1015 | Amino Acid | Ty1-like NLS Q6DK85-0 |
| 1016 | Amino Acid | Ty1-like NLS Q6DRI7-0 |
| 1017 | Amino Acid | Ty1-like NLS Q6DRL5-0 |
| 1018 | Amino Acid | Ty1-like NLS Q6NV26-0 |
| 1019 | Amino Acid | Ty1-like NLS Q6NWI1-0 |
| 1020 | Amino Acid | Ty1-like NLS Q6NYJ3-0 |
| 1021 | Amino Acid | Ty1-like NLS Q6P4K1-0 |
| 1022 | Amino Acid | Ty1-like NLS Q6WKW9-0 |
| 1023 | Amino Acid | Ty1-like NLS Q7ZUF2-0 |
| 1024 | Amino Acid | Ty1-like NLS Q7ZW47-0 |
| 1025 | Amino Acid | Ty1-like NLS Q7ZXZ0-0 |
| 1026 | Amino Acid | Ty1-like NLS Q7ZXZ0-1 |
| 1027 | Amino Acid | Ty1-like NLS Q7ZYR8-0 |
| 1028 | Amino Acid | Ty1-like NLS Q8AVQ6-0 |
| 1029 | Amino Acid | Ty1-like NLS Q9DE07-0 |
| 1030 | Amino Acid | Ty1-like NLS P03086-0 |
| 1031 | Amino Acid | Ty1-like NLS P09814-0 |
| 1032 | Amino Acid | Ty1-like NLS P0CK10-0 |
| 1033 | Amino Acid | Ty1-like NLS P15075-0 |
| 1034 | Amino Acid | Ty1-like NLS P51724-0 |
| 1035 | Amino Acid | Ty1-like NLS P52344-0 |
| 1036 | Amino Acid | Ty1-like NLS P52531-0 |
| 1037 | Amino Acid | Ty1-like NLS Q5UP41-0 |
| 1038 | Amino Acid | Ty1-like NLS Q9DUC0-0 |
| 1039 | Amino Acid | Ty1-like NLS Q9XJS3-0 |

### EXPERIMENTAL EXAMPLES

[0419] The invention is further described in detail by reference to the following experimental examples. These examples are provided for purposes of illustration only and are not intended to be limiting unless otherwise specified. Thus, the invention should in no way be construed as being limited to the following examples, but rather, should be construed to encompass any and all variations which become evident as a result of the teaching provided herein.

[0420] Without further description, it is believed that one of ordinary skill in the art can, using the preceding description and the following illustrative examples, make and utilize the present invention and practice the claimed methods. The following working examples, therefore, specifically point out certain embodiments of the present invention, and are not to be construed as limiting in any way the remainder of the disclosure.

### Example 1: Targeting Toxic Nuclear RNA Foci by CRISPR-Cas13

[0421] The data presented herein demonstrates that RNA-binding CRISPR-Cas13, with a robust non-classical nuclear localization signal, can be efficiently targeted to toxic nuclear RNA foci for either visualization or cleavage, approaches termed herein hilightR and eraseR, respectively. HilightR combines catalytically dead Cas13b (dCas13) with a fluorescent protein to directly visualize CUG repeat RNA foci in the nucleus of live cells, allowing for quantification of foci number and observation of foci dynamics. EraseR utilizes the intrinsic endoribonuclease activity of Cas13b, targeted to nuclear CUG repeat RNA, to disrupt nuclear foci. These studies demonstrate the potential for targeting toxic nuclear RNA foci directly with CRISPR-Cas13 for either the identification or treatment of Myotonic Dystrophy Type 1. The efficient and sequence programmable nature of CRISPR-Cas13 systems allows for rapid targeting and manipulation of other human nuclear RNA disorders, without the associated risks of genome editing.

[0422] Bacterial derived CRISPR-Cas13 systems bind specifically to RNA and function as endoribonucleases to cleave RNA, bypassing the risk of germline editing that is associated with DNA-binding CRISPR-Cas endonucleases. Single residue mutations within the two nuclease domains of Cas13 generate a catalytically deactivated enzyme (dCas13), which retains programmable RNA binding affinity in mammalian systems without the requirement for PAM sequences for efficient targeting. Due to their large size and lack of intrinsic localization signals, both Cas9 and Cas13 fusion proteins are inefficiently localized to the mammalian nucleus. In our recent pre-print manuscript describing a novel adaptation of CRISPR-Cas13 for inducing targeted cleavage and polyadenylation of RNA, a non-classical nuclear localization signal (NLS) derived from the yeast Ty1 retrotransposon was identified which promotes robust nuclear localization of Cas13. The powerful activity of the Ty1 NLS suggested that efficient targeting of nuclear RNAs could be achieved for both visualization and cleavage with CRISPR-Cas13.

[0423] Toxic RNA foci are the cellular hallmark of DM1. To visualize nuclear RNAs using CRISPR-Cas13, a fusion protein was designed combining the catalytically dead Type VI-B Cas13b enzyme from Prevotella sp. P5-125 (dPspCas13b) with either a C-terminal enhanced Green Fluorescent Protein (eGFP) or red fluorescent protein, mCherry (FIG. 1A). A 3×FLAG epitope tag (F) and Ty1 nuclear localization sequence (Ty1 NLS) were added to the N-terminus of the dPspCas13b fusion proteins to promote efficient nuclear localization, hereinafter referred to as hilightR green or hilightR red (FIG. 1A). Toxic RNA foci are the cellular hallmark of DM1 and can be induced in many cell types by the expression of transgenes expressing expanded CUG repeats. To mimic the nuclear RNA foci found in patients with DM1, a vector containing 960 CUG repeats in the human DMPK 3′ UTR (DT960) was utilized (FIG. 1B). The DT960 construct is sufficient to recapitulate RNA foci formation in cells and can be detected by Fluorescent In Situ Hybridization (FISH) using an antisense (CAG) repeat probe or with an mCherry-MBNL1 fusion protein (FIG. 1A and FIG. 1B). To target hilightR fusion proteins to CUG repeats, a PspCas13b-compatible crRNA containing an antisense CAG repeat target sequence (CAGx9) was designed, which is predicted to hybridize with 9 CUG repeats (FIG. 1C). Guided by the CAGx9 repeat crRNA, hilightR green and red were completely nuclear localized and highlighted nuclear RNA foci generated by the DT960 vector (FIG. 1D and FIG. 4). In contrast, co-expression of hilightR constructs with a non-targeting crRNA resulted in broad, un-localized nuclear fluorescence (FIG. 1D and FIG. 1C).

[0424] Nuclear foci labeled with hilightR green co-localized with an Alexa Fluor 488-conjugated CAG oligonucleotide probe (AF488-CAGx7), detected using FISH (FIG. 2A). Consistent with previous reports, nuclear foci labeled with hilightR green co-localized with MBNL1 protein, detected using an mCherry-MBNL1 fusion protein, and partially co-localized with splicing speckles, detected with an antibody specific for SC-35 (FIG. 2B and FIG. 5). These results demonstrate that hilightR accurately detects CUG^{exp} RNA foci.

[0425] CUG^{exp} RNA foci suggested it could be a useful for targeted cleavage of toxic CUG^{exp} RNA, using its inherent endoribonuclease activity. Cas13 has been shown to be useful for specific cleavage of mRNA transcripts in mammalian and plant cells. To determine if Cas13 endoribonuclease activity is sufficient to cleave CUG^{exp} RNA foci, the hilightR green fusion protein was modified by reactivating PspCas13b's catalytic mutations using site directed mutagenesis. Surprisingly, activated hilightR green did not significantly reduce the number of RNA foci using the CAGx9 targeting crRNA, compared with a non-targeting guide-RNA. However, activated PspCas13b containing the N-terminal Ty1 NLS, but lacking the C-terminal eGFP (herein referred to as eraseR), resulted in a significant reduction in the number and intensity of RNA foci, quantified using an mCherry-MNBL1 fusion protein (FIG. 3A and FIG. 3B). Since target site flanking sequences can influence Cas13 nuclease activation, CAGx9 crRNAs were tested in two other reading frames (CAGx9-f2 and CAGx9-f3). EraseR guided by all three CAGx9 crRNAs resulted in significant reduction in the number and intensity of RNA foci per cell, compared to a non-targeting crRNA (FIG. 3A and FIG. 3B). Additionally, catalytically dead PspCas13b containing an N-terminal Ty1 NLS and lacking the C-terminal eGFP did not significantly reduce the number and intensity of RNA foci, quantified using an mCherry-MNBL1 fusion protein (FIG. 6). These date demonstrate for the first time that CRISPR-Cas13 is sufficient to degrade CUG^{exp} RNA foci.

[0426] While there are currently no available therapeutic treatments for Myotonic Dystrophies or other human RNA repeat expansion disorders, the rapid progression of RNA-targeting CRISPR-Cas systems offer hope that targeted approaches to treat DM1 will soon be achievable. While ASOs are highly efficient for disrupting the binding between splicing factors and toxic RNA foci, these approaches are currently limited by inadequate delivery methods. Additionally, gene therapy approaches to restore DMPK or MBNL expression are insufficient to rescue the dominant cytotoxic gain of function deficits which occur as the result of CUG^{exp} RNAs. Thus, targeted disruption of CUG RNAs is a promising strategy to reduce or prevent RNA induced disease. It is demonstrated herein that CRISPR-Cas13, localized by a powerful non-classical Ty1 NLS, can be used to efficiently target CUG^{exp} RNA foci for both visualization and targeted degradation. The Ty1 NLS is derived from a yeast LTR-retrotransposon, which uses reverse transcription of an RNA intermediate in the cytoplasm followed by integration of a proviral DNA copy in the nucleus for genome replication. As opposed to higher eukaryotes which undergo open mitosis during cell division, yeast undergo closed mitosis, during which the nuclear envelope remains intact. During Ty1 biogenesis, nuclear import of the retrotransposon genome complex requires active nuclear import and thus contains a robust NLS which is required for retrotransposition. Interestingly, in the quiescent mammalian cells which retain a nuclear envelope, the Ty1 NLS may be similarly required for efficient targeting of nuclear RNAs by Cas proteins.

[0427] The programmable nature of CRISPR-Cas13, through simple modification of crRNA target sequences, allow hilightR and eraseR to be easily adapted for the study and cleavage of other nuclear RNAs, or other repeat expansion disorders such as Myotonic Dystrophy type 2 (DM2), Amyotrophic lateral sclerosis (ALS), Huntington's disease-like 2 (HDL2), Spinocerebellar ataxias 8, 31 and 10 (SCAB, −31, −10) and fragile X-associated tremor ataxia syndrome (FXTAS). As with other systems (ASO or CRISPR-Cas) which directly target short tandem repeat sequences, there remains potential for off-target cleavage of other human mRNA transcripts which contain non-pathogenic short repeat motifs. Alternatively, targeting unique DMPK sequences for degradation or by other forms of RNA manipulation of microsatellite RNAs with CRISPR-Cas13 fusion proteins may offer additional approaches for the treatment of toxic RNA diseases.

[0428] The materials and methods are now described.

[0429] Synthetic DNA and Cloning

[0430] The mammalian expression vector containing an N-terminal 3×FLAG and Ty1 NLS fused to dPspCas13b was modified to encode a C-terminal enhanced Green Fluorescent Protein (eGFP) or mCherry red fluorescent protein. All crRNAs were designed to be 30 nucleotides in length and start with a 5′ G for efficient transcription from the hU6 promoter in pC00043. The negative control non-targeting crRNA has been previous described. To generate the mCherry-MBNL expression plasmid, the coding sequence of human MBNL1 was designed and synthesized for assembly as a gBlock (IDT, Integrated DNA Technologies) and cloned into the CS2mCherry mammalian expression plasmid.

[0431] Cell Culture and Immunohistochemistry

[0432] The COS7 cell line was maintained in DMEM supplemented with 10% Fetal Bovine Serum (FBS) with penicillin/streptomycin at 37° C. in an atmosphere of 5% CO₂. Cells were seeded on glass coverslips in 6-well plates and transiently transfected using Fugene6 (Promega) according to manufacturer's protocol. Transiently transfected COS7 cells were fixed in 4% formaldehyde in DPBS for 15 minutes, blocked in 3% Bovine Serum Albumin (BSA) and incubated with primary antibodies in 1% BSA for 4 hours at room temperature. Primary antibodies used were anti-FLAG (Sigma, F1864) at 1:1000 and anti-SC-35 (Abcam, ab11826) at 1:1000. Cells were subsequently incubated with an Alexa Fluor 488 or 594 conjugated secondary antibody (Thermofisher) in 1% BSA for 30 minutes at room temperature. Coverslips were mounted using anti-fade fluorescent mounting medium containing DAPI (Vector Biolabs, H-1200) and imaged using confocal microscopy.

[0433] Fluorescent In Situ Hybridization (FISH)

[0434] Post-transfection, cells were fixed in ice cold 100% Methanol for 10 minutes at −20° C., then washed 2 times with DPBS and 1 time with Wash Buffer [2×SSC pH 7.0, 10% Formamide]. Cells were subsequently hybridized with probe in Hybridization Buffer [10% Dextran Sulfate, 2×SSC pH7.0, 10% Formamide] with a final probe concentration of 100 nM. Cells were hybridized overnight at 37° C. Cells were then washed one time in Wash Buffer at 37° C. for 30 minutes, then mounted with VectaShield with DAPI (Vector Biolabs) on slides and imaged using confocal microscopy. The probe was a 21-mer DNA oligonucleotide (CAGCAGCAGCAGCAGCAGCAG (SEQ ID NO:303)) conjugated with a 5′ Alexa Fluor 488 dye and purified using HPLC (IDT, Integrated DNA Technologies).

### Example 2: Targeted Degradation of CUGexp RNA with Eraser

[0435] Myotonic dystrophy type 1 (DM1) is an inherited multi-system, progressively debilitating disease occurring in 1 in 8,000 individuals, with an incidence as high as 1 in 500 in specific populations Cardiac complications develop in ˜80% of DM1 patients and is the primary cause of death. DM1 arises from the expansion and expression of a CUG trinucleotide repeat in the noncoding 3′ untranslated region of the human Dystrophia myotonica protein kinase (DMPK) gene (FIG. 8). Mutant DMPK mRNAs with greater than ˜50 CUG repeats form toxic nuclear RNA foci, which prevent normal DMPK expression and induce widespread defects in alternative splicing by sequestering members of the muscleblind-like (MBNL) family of RNA binding proteins (FIG. 8). Due to the multitude of disrupted muscle genes underlying DM1 pathogenesis, patients often present with a variety of clinical cardiac phenotypes, including atrial and ventricular arrhythmias, dilated cardiomyopathy, and myocardial fibrosis. There are currently no approved therapies to treat DM1, and previous approaches to target repeat foci using anti-sense oligonucleotides (ASOs) remain challenging due to inefficient delivery to adult human cardiac and skeletal muscle.

[0436] As demonstrated in Example 1 RNA binding CRISPR-Cas13, when localized with a robust non-classical nuclear localization signal, can be used to visualize and degrade toxic nuclear RNA foci in cells, tools named hilightR and eraseR (FIG. 8). CRISPR-Cas technologies offer hope that targeted therapeutics can be developed for treatment of human RNA diseases, which cannot be corrected using traditional gene therapy replacement strategies. However, it remains unclear if degradation of toxic RNA foci is sufficient to prevent DM1 pathogenesis in the heart or if DM1-associated cellular and electrical remodeling is reversible. Targeted degradation of toxic RNA foci with eraseR in a mouse cardiac model of DM1 improves cardiac gene expression and pump function by restoring normal RNA splicing (FIG. 8). As described herein eraseR is developed as an efficient and specific tool for disrupting CUG^{exp} RNA in vivo and determine the therapeutic outcomes using eraseR in a mouse cardiac model of DM1.

[0437] Toxic Nuclear Foci can be Targeted by Cas13

[0438] CRISPR-Cas13 systems bind only to RNA and function as specific endoribonucleases to cleave target RNAs, bypassing the risk of germline editing that is associated with DNA-binding CRISPR-Cas endonucleases. However, due to their large size and lack of intrinsic localization signals, Cas13 fusion proteins are inefficiently localized to the mammalian nucleus. We recently identified a non-classical nuclear localization signal (NLS) derived from the yeast Ty1 retrotransposon which promotes robust nuclear localization of Cas13. The powerful activity of the Ty1 NLS suggested that efficient targeting of nuclear RNAs could be achieved for either visualization or cleavage using CRISPR-Cas13.

[0439] To determine nuclear repeat RNAs could be visualized in live cells, a fusion protein was designed using the catalytically dead Type VI-B Cas13b enzyme from Prevotella sp. P5-125 (dPspCas13b) with a C-terminal enhanced Green Fluorescent Protein (eGFP) (FIG. 1A). To mimic the nuclear RNA foci found in patients with DM1, transient expression of a vector containing 960 CUG repeats in the human DMPK 3′ UTR (DT960) was used (FIG. 1B). To target the dPspCas13b-eGFP fusion protein to CUG repeats, a PspCas13b compatible crRNA containing a CAG repeat target sequence was designed, which is predicted to hybridize with 9 CUG repeats (FIG. 1C). Guided by the CAG repeat crRNA, co-transfection of the dPspCas13b-eGFP was completely nuclear localized and highlighted nuclear RNA foci generated specifically from the expression of DT960 (FIG. 1D). In contrast, co-expression with a non-targeting crRNA resulted in broad, un-localized nuclear fluorescence (FIG. 1D). The efficient nuclear targeting of Cas13 to CUG RNA foci suggested it could be a useful tool for targeted cleavage of CUG^{exp} RNA using its inherent endoribonuclease activity.

[0440] EraseR can Degrade Toxic RNA Foci In Vitro

[0441] Activated PspCas13b, containing the Ty1 NLS, resulted in a significant reduction in the number of RNA foci and intensity, as detected using mCherry-MNBL1 (FIG. 3A and FIG. 3B). Because surrounding target sequences can influence Cas13 nuclease activity, crRNAs were tested in all three reading frames and all CAGx9 crRNAs resulted in significant reduction in the number of RNA foci per cell (FIG. 3). These data show that eraseR efficiently reduces toxic RNA foci induced by CUG^{exp} in the human DMPK gene in vitro.

[0442] These studies are the first to demonstrate that CRISPR-Cas13 are sufficient to target and degrade CUG^{exp} RNA, which offers a clear path towards the development of novel therapeutic approaches for treating DM1. Additional studies are rigorously designed and controlled to determine the parameters which enhance eraseR cleavage of toxic RNA foci and efficacy in a cardiac humanized mouse model of DM1. Importantly, the tools developed and tested herein are identical to those which could be delivered to human DM1 patients.

[0443] Targeted Degradation of CUG^{exp} RNA with eraseR

[0444] Multiple variables can impact the cleavage efficiency of CRISPR-Cas13 endoribonuclease activation, which ultimately will underscore the efficiency of cleavage and therapeutic potential of eraseR for treating DM1. While the data presented herein showed that eraseR can already significantly degrade RNA foci, it is determined herein if cleavage efficiency can be further enhanced by modifications to the Cas13 protein, crRNA guide and/or target sequences. Reduction of RNA foci in cells is analyzed using fluorescent in situ hybridization (FISH), fluorescence using an mCherry-tagged MBNL1, and quantitative realtime-PCR using primers specific to the DT960 transcript.

[0445] Different Cas13 family members. EraseR utilizes Cas13b from Prevotella sp. P5-125 (PspCas13b), which was previously shown to be the most robust Cas13 member for RNA base editing. However, Cas13 systems are comprised by 4 major families (Cas13A-D), which may provide different cleavage activities for degrading CUG^{exp} RNA foci. Therefore, representative Cas13 proteins are cloned with N terminal Ty1 NLS fusions into the CSX expression vector and their relative cleavage efficiencies are determined compared to PspCas13b.

[0446] Guide RNA length. Every naturally occurring Cas13 CRISPR array has a specific spacer and direct repeat length, with the spacer length corresponding to the size of the RNA target sequence. Initial studies with PspCas13 utilized a spacer length of 30 nucleotides, which matches the endogenous spacer size. However, spacer length can influence target sequence recognition, cleavage activation, or packing of Cas13 enzymes onto tandem repeat sequences. Therefore, it is tested whether spacer length influences degradation of foci by testing crRNAs with shorter (25nt), and longer (35, 40, 45, 50, 55 and 60nts) in length.

[0447] Activation by CRISPR cleavage activity by Accessory Proteins. Some CRISPR-Cas13 families are clustered with smaller CRISPR associated proteins, which serve to either inhibit or enhance cleavage efficiency. It is determined if co-expression of Csx28, which has been previously shown to enhance Cas13b cleavage activity, enhances the degradation of RNA foci using our cell based assays.

[0448] Determination of Whether Reduction of RNA Foci by eraseR Ameliorates DM1 Cardiovascular Phenotypes In Vivo.

[0449] A cardiac DM1 mouse model with a Tet inducible transgene encoding the human DMPK gene with 960 CUG repeats (CUG960) is used and is induced using a cardiac specific tTA transgene (Myh6-tTA) (FIG. 9). Expression of this construct has previously been shown to induce MBNL-associated RNA foci formation, splicing defects, and cardiac dysfunction, including dilated cardiomyopathy, arrhythmias and contractile defects. Briefly, CUG960 homozygous mice are crossed with a hemizygous tTA mouse to generate bi-transgenic offspring (CUG960 and Myh6-tTA) and single transgenic (CUG960) controls (FIG. 9A and FIG. 9B).

[0450] Cardiomyocyte-specific gene delivery using AAV9 virus in mice. AAV9 serotype virus is a promising therapeutic vector for delivery and expression of genes in the heart. EraseR and guide-RNA expression cassettes are subcloned into an AAV9 viral packaging plasmid and high titer virus is generated (FIG. 9C). For these studies, eraseR using the PspCas13b and CAGx9 guide RNA is used. AAV9 virus encoding Luciferase driven by the chicken cardiac Troponin T promoter (cTnT) for cardiomyocyte-specific expression (pAAV:cTNT::Luciferase), showed robust cardiac specific expression, when injected intraperitoneally in postnatal day 10 (P10) neonates and visualized using 150 μg/g Luciferin after 10 weeks (FIG. 9D). At P10, 3.75e11 gc/ml of AAV is injected via the superficial temporal vein in 6 male and 6 female CUG960:tTA bi-transgenic mice, and an equal number of male and female single transgenic controls. Measurements (see below) are made at 12 weeks post injection. EraseR treated mice show improved cardiac function (FIG. 9E).

[0451] Determination of whether eraseR treatment ameliorates heart function by echocardiography and electrocardiography. Serial echocardiography is performed at 12 weeks following AAV-mediated eraseR injection by two-dimensional echocardiography using the SIG Visual Sonics Vevo 2100. Measurements of heart rate (HR), fractional shortening (FS) and ejection fraction (EF), and left ventricular dimensions are recorded and compared. Fractional shortening (% FS) are used to indicate impaired cardiac function and a % FS below 40% is used to indicate cardiomyopathy. ECG measurements on anesthetized mice are measured using AdInstruments BioAmp ECG apparatus. ECG recordings are captured for 10 minutes for each animal and analyzed using LabChart7 software. Special attention is paid to the lengths of the PR and QRS intervals, as this is prolonged in DM1.

[0452] Evaluation of cardiac histology and RNA foci in eraseR-treated DM1 hearts. Following echocardiography and ECG measurements, hearts are collected for histological analysis for by paraffin embedding. H&E staining is used to visualize any differences in gross anatomy and cardiomyocyte cell morphology. To identify changes in heart growth, morphometric measurements include heart weight to body weight, heart weight to tibia length, left ventricular posterior wall thickness and interventricular septum thickness. At 12 weeks of age, after non-invasive cardiac monitoring experiments are performed, hearts from half the mice are harvested for histology and half the hearts are analyzed using qRT-PCR to determine knockdown of the CUG960 transgene and for rescue of splicing. Nuclear foci are examined at 12 weeks by FISH using a 21-mer oligonucleotide conjugated with a 5′ Alexa Fluor 488 dye. Nuclei are counterstained with DAPI. EraseR treated mice have significantly reduced nuclear foci and decreased levels of toxic RNA.

[0453] Models which have been developed for DM1 can vary broadly in their phonotypic severity and gender specific differences may interfere with outcomes of heart phenotype and cardiac electrophysiology. Male DM1 patients are more likely to present with DM1 symptoms and more at risk for developing cardiac conduction defects than female patients. Given the importance of gender specific differences, both genders are examined.

[0454] Statistical Methods. Students t-test is applied to compare single treatments. Multiple physiological and biochemical assays are analyzed using one-way or repeated measures ANOVA. Post-hoc analysis (i.e. Newman-Keuls) is performed.

### Example 3: Enhancing RNA Visualization and Fusion Protein Localization with dCas13

[0455] Fusion of dPspCas13b with enhanced GFP (eGFP), combined with the Ty1 NLS, allowed for robust and specific visualization of nuclear RNA foci (FIG. 10A). For visualization of microsatellite repeat expanded RNA foci, target RNA signal intensity over background is aided by 1) multiple RNA target sequences within the repetitive RNA sequences, and 2) focal concentration of signal within a nuclear foci. Visualization applications targeting unique or low copy RNA sequences are traditionally hampered by low signal-to-noise ratios. Described herein is an approach for Cas13 to enhance the 1) signal to noise ratio of dCas13 targeted RNAs or to increase the localization of a fusion protein to a target RNA sequence.

[0456] This approach relies on the fluorescent complementation inherent in superfolder GFP, which similar to GFP, is comprised of a beta barrel structure of 11 beta strands. Deletion of the 11th beta strand from sfGFP abolishes fluorescent activity, however, the 11th beta strand can be delivered in cis or trans to restore fluorescence. Further, the 11th strand can serve as a small tag on a protein, which when co-expressed with sfGFP encoding the first 10 beta strands, will reconstitute a GFP fusion protein (FIG. 10B). Tandem assembly of S11 strands has the potential to increase the signal to noise ratio of dCas13 targeted RNAs (FIG. 10C). Further, this approach could be similarly useful for targeting a larger number of fusion proteins (Protein X) when co-expressed with a sfGFP 1-10 encoding a fusion to a protein of interested (FIG. 10D).

### Example 4: Targeted Destruction of Coronavirus RNA by CRISPR-Cas13 Delivered with Integration Deficient Lentiviral Vectors

[0457] The data presented herein demonstrate the efficacy of using RNA-targeting CRISPR-Cas13 platforms as an approach to 1) identify effective CRISPR-guide RNAs targeting essential and conserved coronavirus RNA sequences, 2) identify the most robust guide-RNA and CRISPR-Cas13 platforms for robust coronavirus RNA cleavage, and 3), harness non-integrating lentiviral vectors pseudotyped with coronavirus Spike protein. These experiments represent a major first step toward the development of a novel targeted therapeutic for treating coronavirus infections. Notably, the rapid programmability and delivery of this approach could be adapted to target diverse coronavirus strains or other infectious RNA viruses, such as influenza.

[0458] Coronavirus Lifecycle

[0459] Coronavirus genomes are encoded by a large (˜30 kb), single-stranded mRNA, which is capped and polyadenylated, allowing for translation by host proteins. Coronavirus genomes replicate entirely through RNA intermediates, generating both full-length genomic mRNA and nested subgenomic mRNAs, allowing for expression of numerous viral proteins.

[0460] Targeting

[0461] As a result of coronavirus replication and transcription, 5′ sequences (Leader) and 3′ sequences (S2M or Nucleocapsid ORF) are common to genomic and all subgenomic RNAs (FIG. 11). These sequences provide the opportunity for design of guide-RNAs which have the capacity for broad efficacy. Tiling CRISPR RNAs (crRNAs) are tested in cell-based luciferase reporter assays using a luciferase reporter mRNA containing coronavirus target sequences in 5′ UTR or 3′UTR regions.

[0462] Cleavage

[0463] RNA cleavage efficacy and specificity of coronavirus target sequences are determined in the above assays utilizing novel CRISPR-Cas13 systems (eraseR platforms), with enhanced guide-RNA expression constructs and/or CRISPR arrays (FIG. 12).

[0464] Delivery

[0465] Lentiviral vectors are enveloped and can be pseudotyped with different viral envelope proteins to alter viral tropism (FIG. 13). The efficacy and stability of lentiviral vectors pseudotyped with coronavirus envelope spike protein to transduce ACE2-expressing cell types is determined. Nonintegrating, 3rd generation lentiviral vectors, produced using catalytically inactive Integrase, offer a safe and transient expression approach for viral RNA clearance, without permanent expression.

[0466] Lentiviral constructs encoding CRISPR-Cas13 components can be packaged into non-integrating lentiviral particles pseudotyped with viral envelope proteins. For example, the lentiviral particle can be pseudotyped with the Spike glycoprotein from SARS-CoV-2 coronavirus, which provides specificity for entry into ACE2 receptor expressing cells. (FIG. 14B). This allows for specific targeting of ‘coronavirus-targeted’ cell types. Post-transduction, the processing and formation of non-integrating lentiviral episomes allows for transient expression of CRISPR-Cas13 components for acute targeted degradation of CoV genomic and subgenomic viral mRNAs (FIG. 14C).

[0467] A Luciferase reporter containing the SARS-2-CoV S2M sequence was used. (FIG. 17A). Seven crRNAs were designed targeting the CoV leader sequence. (FIG. 17B). Cell-based luciferase assays demonstrate robust knockdown of CoV Leader Luc reporter activity in cells with crRNAs targeting SARS-CoV-2 leader sequence (crRNAs A through G) or Luciferase coding sequence (Luc), relative to a non-targeting crRNA (FIG. 17C).

[0468] Additionally, a Luciferase reporter containing the SARS-2-CoV S2M sequence was used. (FIG. 18A). Six crRNAs were designed targeting the SARS-2-CoV S2M sequence. (FIG. 18B). Cell-based luciferase assays demonstrate robust knockdown of CoV S2M Luc reporter activity in cells with crRNAs targeting SARS-CoV-2 S2M sequence (crRNAs A through F) or Luciferase coding sequence (Luc), relative to a non-targeting crRNA (FIG. 18C).

### Example 5: One-Step Directional Assembly of CRISPR-Cas13 crRNA Arrays

[0469] The data provided herein demonstrates the design and validation of an approach to generate crRNA arrays by direct ligation of multiple annealed oligo pairs containing nucleotide substitutions within DR sequences (FIG. 19D). This rapid assembly approach was used to efficiently generate tandem ordered arrays for 3 spacer sequences, which notably, do not contain poly T stretches within the DR sequence, thereby promoting full-length array transcription. Given other potential nucleotide substitutions in these positions, arrays of up to 7 crRNAs lacking a DR T stretch could be assembled in a single-step, or arrays up to 8 crRNAs if a DR T stretch is included (FIG. 19E).

[0470] CRISPR-Cas13 guide RNAs occur naturally in bacterial species in tandem arrays, which are subsequently processed into single guides by Cas13-mediated cleavage (FIG. 19A). This cleavage activity is separable from target RNA cleavage activity, thus ‘catalytically dead’ (dCas13) retains this crRNA processing ability. Many CRISPR-Cas13 direct repeats contain poly T sequences of 4-5 nucleotides which have the potential to inhibit single or tandem full-length crRNA expression from commonly used Pol III promoters, such as hU6, in mammalian cells (FIG. 19B). Crystallography studies have revealed that the poly T stretches occur in the loop region of the direct repeat (DR), and that at least one T nucleotide projects into space, suggesting it doesn't play an important role in CRISPR-Cas13 binding or cleavage. As shown herein, mutation of two positions within this T stretch, T17C or T18C, does not inhibit dCas13 or Cas13-mediated activity. Thus, these changes can be harnessed to generate diversity within the DR sequence to allow for multiplex, directional cloning.

[0471] Mammalian guide-RNA expression cassettes are generally created by cloning annealed oligonucleotides comprising the spacer sequence into a cassette comprised of a mammalian Pol III promoter, a Direct Repeat and a terminator of 6 or more Ts (FIG. 19C). Commonly, multiple guide-RNAs are expressed by adding addition Pol III promoter cassettes, however this can significantly increase the complexity and size of the vector. Generation of tandem crRNA arrays would significantly decrease the size requirements of the vector; however, nucleotide synthesis of long arrays is prohibited due to size and the repeat nature of DR sequences.

### Example 6: Enhanced Knockdown of SARS-CoV-2 Viral Sequences with a CRISPR crRNA Array

[0472] Example 4 demonstrates the design and validation of CRISPR guide-RNAs capable of robust knockdown of a luciferase reporter encoding SARS-CoV-2 viral sequences. Example 5 demonstrates the development of a cloning strategy for the directional assembly of tandem crRNA arrays, which take advantage of base substitutions in non-essential residues within the loop region of Cas13b Direct Repeat (FIG. 19E and FIG. 20A). The data presented herein demonstrates that all possible base mutations within these two loop residues (T17 and T18) do not negatively affect guide RNA targeting and knockdown of a luciferase reporter mRNA for two independent guide RNAs targeting luciferase coding sequence (Luc-a and Luc-b) (FIG. 20B).

[0473] Lentiviral gene transfer vectors encoding CRISPR-Cas13 with single or triple crRNA arrays targeting SARS-CoV-2 viral sequences were developed. (FIG. 21A). A luciferase reporter was constructed containing Leader and N protein SARS-CoV-2 viral target sequences, encoded in both the 5′ and 3′ UTR regions of a Luciferase reporter mRNA (FIG. 21B). The data presented herein shows that expression of multiple guide-RNAs from a single promoter, encoded in a lentiviral transfer vector, results in greater luciferase activity knockdown compared with expression of a single guide RNA (FIG. 21C). These results demonstrate greater efficacy for using multiple guide-RNAs targeting a single viral genome, with the added benefit that multiple guide RNAs may further prevent viral ‘escape,’ which may occur through random mutagenesis or by therapeutic selection.

[0474] Additionally, the CRISPR-Cas13 expression cassette encoding the tripe guide array is small enough to be packaged within an AAV vector, which may be a useful alternative viral gene therapy delivery method (FIG. 22).

### Example 7: Targeting Influenza Virus Subtypes with CRISPR-Cas13

[0475] Examples 4 and 6 demonstrate that CRISPR-Cas13 can efficiently knockdown the expression of a luciferase reporter encoding coronavirus SARS-CoV-2 viral sequences. Based on the replication characteristics, single guide RNAs can be designed to target all coronavirus genomic and subgenomic RNAs. Additionally, expression of multiple guide RNAs in an array, expressed from a single promoter, resulted in enhanced viral reporter knockdown.

[0476] Similar to coronavirus, Influenza viruses are enveloped, RNA viruses which infect both animals and humans and have significant potential for becoming global pandemics. In contrast to coronavirus, influenza virus is composed of 8 independent viral RNA segments, which localize and replicate within the vertebrate nucleus (FIG. 23A). Viral RNA (vRNA) segments encode at least 10 proteins, which encode viral replication enzymes, structural proteins and envelope glycoproteins required for host cell binding and fusion. The multi-segment viral RNA genome allows for rapid mutation and viral selection; as viral segments can be readily switched between viral subtypes within infected cells. This has led to a diverse number of Influenza subtypes, which are categorized by envelope proteins Hemagglutinin (HA) and Neuraminidase (NA). These features present a unique challenge for the targeted degradation of Influenza viral RNA by CRISPR-Cas13.

[0477] The data presented herein presents the design of crRNAs which could target the 4 major Influenza A viral subtypes which have cause significant human disease in the recent past, and retain significant potential for becoming global pandemics (H1N1, H2N2, H3N2 and H7N9). Using multiple sequence alignment of viral protein coding sequences across these four subtypes, conserved segments were identified for five of the 8 viral segments (Table 3). Large conserved viral sequences across subtypes for HA and NA genes were not identified, consistent with their rapid evolution which enables evasion to host immunity. For these five regions, guide RNAs were designed to target either the negative-sense viral RNA (vRNA) or positive-sense viral protein coding mRNA. Guide-RNA arrays were designed to express all five crRNAs from a single Pol III promoter.

[0478] Encoding CRISPR guide arrays and Cas13 expression cassettes within a lentiviral gene transfer vector (or alternative gene therapy vector, such as AAV), would allow for the generation of a single particle for delivery and expression of CRISPR-Cas13 components to vertebrate cells (FIG. 14). Pseudotyping lentiviral vectors with NA and HA envelope proteins could be utilized to target specific cell types infected by Influenza virus, such as airway epithelia.

TABLE 3
Sequence alignment and identification of conserved coding sequences among
Influenza A Segments from H1N1, H2N2, H3N2, H7N9.

| | | SEQ |
|---|---|---|
| | | ID NO |
| SEGMENT 1 | | |
| H1N1 | GTGTTGGTAATGAAACGAAAACGGGACTCTAGCATACTTACTGACAGCCAGACAGCGACC | 328 |
| | 2253 | |
| H3N2 | GTGTTGGTAATGAAACGAAAACGGGACTCTAGCATACTTACTGACAGCCAGACAGCGACC | 329 |
| | 2280 | |
| H7N9 | GTGTTGGTGATGAAACGGAAACGGGACTCTAGCATACTTACTGACAGTCAGACAGCGACC | 330 |
| | 2253 | |
| H2N2 | GTGTTGGTAATGAAACGAAAACGGGACTCTAGCATACTTACTGACAGCCAGACAGCGACC | 331 |
| | 2280 | |
| | ********.********.***************************************** | |
| SEGMENT 2 | | |
| H1N1 | GGACGGATCAAGAAAGAAGAGTTCTCTGAGATCATGAAGATCTGTTCCACCATTGAAGAA | 332 |
| | 2256 | |
| H3N2 | GGACGGATTAAGAAGGAAGAGTTCTCTGAGATCATGAAGATCTGTTCCACCATTGAAGAA | 333 |
| | 2280 | |
| H7N9 | GGAAGGATTAAGAAAGAAGAGTTTGCTGAGATCATGAAGATCTGTTCCACCATTGAAGAG | 334 |
| | 2256 | |
| H2N2 | GGACGGATTAAGAAAGAGGAGTTCGCTGAGATCATGAAGATCTGTTCCACCATTGAAGAG | 335 |
| | 2280 | |
| | ***.*********.**.***** **********************************. | |
| SEGMENT 3 | | |
| H1N1 | AATCGAGGAGTGCCTGATTAATGATCCCTGGGTTTTGCTTAATGCATCTTGGTTCAACTCC | 336 |
| | 2135 | |
| H3N2 | AATTGAGGAGTGCCTGATTAATGATCCCTGGGTTTTGCTCAATGCATCTTGGTTCAACTCC | 337 |
| | 2160 | |
| H7N9 | AATCGAGGAGTGCCTGATTAATGATCCCTGGGTTTTGCTTAATGCATCTTGGTTCAACTCC | 338 |
| | 2136 | |
| H2N2 | AATTGAGGAGTGCCTGATTAATGATCCCTGGGTTTTGCTTAATGCGTCTTGGTTCAACTCC | 339 |
| | 2160 | |
| | ******************************************.************** | |
| SEGMENT 5 | | |
| H1N1 | TTGACATGAGTAATGAAGGGTCTTATTTCTTCGGAGACAATGCAGAGGAGTATGACAGTT | 340 |
| | 1476 | |
| H3N2 | TTGATATGAGTAATGAAGGATCTTATTTCTTCGGAGACAATGCAGAAGAGTACGACAATT | 341 |
| | 1540 | |
| H7N9 | TTGACATGAATAATGAAGGATCTTATTTCTTCGGAGACAATGCAGAGGAGTATGACAATT | 342 |
| | 1486 | |
| H2N2 | TTGACATGAGTAATGAAGGATCTTATTTCTTCGGAGACAATGCAGAGGAGTACGACAATT | 343 |
| | 1477 | |
| | ********.*********.**************************.***** ****.** | |
| SEGMENT 7 | | |
| H1N1 | TTCTATCATCCCGTCAGGCCCCCTCAAAGCCGAGATCGCGCAGAGACTGGAAAGTGTCTT 95 | 344 |
| H3N2 | CTCTATCGTTCCATCAGGCCCCCTCAAAGCCGAGATCGCGCAGAGACTTGAAGATGTCTT | 345 |
| | 120 | |
| H7N9 | CTCTATCATTCCATCAGGCCCCCTCAAAGCCGAGATCGCACAGAGACTTGAGGATGTTTT 95 | 346 |
| H2N2 | CTCTATCGTCCCGTCAGGCCCCCTCAAAGCCGAGATCGCACAGAGACTTGAAGATGTCTT | 347 |
| | 120 | |
| | ******.***.**************************.******** **...*** ** | |

### Example 8: Relative Knockdown of Toxic Nuclear RNA Foci by Different CRISPR-Cas13 Subtypes

[0479] Currently, four CRISPR-Cas13 subtypes have been identified in bacteria (Cas13a, Cas13b, Cas13c and Cas13d), which are classified according to protein sequence similarity and subtype specific locus features. All CRISPR-Cas13 subtypes are guided by small CRISPR RNAs (crRNAs) and contain two HEPN domains which are required for their catalytic RNase activity. CRISPR-RNAs for each subtype are composed of a unique direct repeat (DR) sequence, which functions as a handle for Cas13 binding, and different optimal spacer sequence lengths for target RNA recognition (for example, 30 nt for PspCas13b, 22 nt for RfxCas13d, and 28 nt for LwCas13a). As well, the relative orientation of Spacer and DR sequences are unique for each subtype (for example, Cas13b encodes a 3′ DR, whereas Cas13a, Cas13c and Cas13d encode a 5′ DR). Currently, family members from three CRISPR-Cas13 subtypes (Cas13a, Cas13b and Cas13d) have been shown to be effective for RNA knockdown when expressed in mammalian cells, however, can display different knockdown efficiencies, which may be due to guide-RNA targeting efficiencies, or Cas13 protein stability. For the latter, CRISPR-Cas13a subtypes have been shown to be less stable in mammalian cells unless fused to superfolder GFP, and some Cas13d family members, such as RfxCas13d, cleave less efficiently when localized in the cytoplasm.

[0480] To determine the relative cleavage efficiencies for CRISPR-Cas13 subtypes (Cas13a,-b and -d) in degrading toxic nuclear RNA foci, guide RNAs were designed specific for each subtype to target a luciferase reporter containing an expanded CUG RNA repeat located in the 3′ UTR (pGL3P-DT960) (FIG. 25A). Expanded CUG repeats, a hallmark of human Myotonic Dystrophies, induce nuclear RNA foci which sequester essential MBNL splicing factors. We designed guide RNAs for each subtype to target both the luciferase coding sequence (Luc-A and —B), as well as guides to target all three frames of the CUG repeat (CAG F1, −2, and −3). Interestingly, PspCas13b fused with the robust Ty1 NLS (eraseR) and RfxCas13d fused with two copies of the SV40 NLS (CasRx-NLS) showed robust knockdown of pGL3P-DT960 reporter when targeted with either Luciferase- or CUG-targeting crRNAs. LwCas13a showed the least amount of reporter activity knockdown. The smaller size of Cas13d subtypes allows for their localization by classical nuclear localization sequences in dividing cells, however, the addition the robust Ty1 NLS may further enhance nuclear localization and cleavage efficiencies of Cas13d (or Cas13a), for targeting nuclear RNAs. Together, these data demonstrate that nuclear localized CRISPR-Cas13b and -Cas13d subtypes are effective for knocking down toxic nuclear repeat RNAs.

[0481] To directly assess if CRISPR-Cas13 subtypes can degrade toxic nuclear RNA foci, we co-expressed CRISPR-Cas13 subtypes with a plasmid expressing 960 copies of a CUG expanded RNA repeat in the context of the human DMPK RNA (DT960), which induces robust formation of nuclear RNA foci in mammalian cells. Consistent with our previous results, PspCas13b fused with the robust Ty1 NLS (eraseR) and RfxCas13d fused with two copies of the SV40 NLS (CasRx-NLS) resulted in a significant decrease in the number of foci per cell when targeted using crRNAs specific to the CUG repeat (CAG-F1, −2, −3), relative to a non-targeting crRNA (NT) (FIGS. 26A and 26B). Interestingly, LwCas13a showed no significant decrease in the number of nuclear foci compared to a non-targeting guide (FIG. 26C). Thus, CRISPR-Cas13b and -d subtypes can efficiently degrade toxic nuclear foci in mammalian cells.

### Example 9: CoV Spike Modifications to Enhance Pseudotyping of Lentiviral Vectors

[0482] Coronavirus and lentivirus are both enveloped RNA viruses which encode a membrane bound Spike envelope protein which provides both host cell specificity and fusion between virus and host cell membranes during transduction. Remarkably, lentiviruses have the potential to utilize envelope proteins from other viruses, for example Influenza virus, Ebola virus, Baculovirus and Coronavirus, to provide altered host cell tropism. However, viral envelope proteins from Coronaviruses (CoVs) are not efficient for pseudotyping of lentiviral vectors without N and C-terminal modifications (FIG. 27A), likely due to the fact that these viruses are generated through different host cell secretory pathways. The data presented herein demonstrates that modification of both N- and C-termini of the Spike protein from SARS-CoV-1 is necessary for efficient transduction of pseudotyped lentiviral vectors into human cells, which also depends on the expression of the viral host receptor, ACE2 (FIG. 27B). Similarly, N- and C-terminal modifications are also required for ACE2-dependent transduction of lentiviral vectors pseudotyped with SARS-CoV-2 Spike protein (FIG. 27B). These include the addition of the Signal peptide from human CD5 and 27 amino acid trunctation of the SARS-CoV-2 cytoplasmic tail.

[0483] Pseudotyped lentiviral vectors can be used for the delivery CRISPR-Cas13 to specific therapeutic cell types targeted by infectious agents. Perhaps the most utilized viral envelope protein, VSV-G, which allows robust entry into diverse cell types in culture, independent of ACE2 expression, is less efficient for transduction of many cell types in vivo, due to the location of the VSV-G host receptor on the basal vs apical cell surface. The remarkably infectious nature of SARS-CoV-2 and its strong interaction with the ACE2 receptor, suggest that utilizing CoV Spike proteins may offer a unique ability to transduce therapeutically beneficial tissues in humans, including respiratory, vascular, renal, and cardiovascular cell types

[0484] Generation of ACE2-HEK293T Stable Cell Lines

[0485] Stable ACE2 expressing cells were generated using transient transfection and antibiotic selection of a human ACE2 expression cassette, modified to carrying a Blasticidin resistance gene and express ACE2 with the EF1a promoter (EF1a-hACE2-Blast). To further eliminate non-ACE2 expressing cells after selection, Blasticidin-selected cells were transduced with lentivirus encoding a Puromycin antibiotic resistance gene pseudotyped with the modified SARS-CoV-2 spike envelope protein (4LV). For this approach, transduction of puromycin encoding lentivirus is only permissible to ACE2 expressing cells due to the specificity of the SARS-CoV-2 Spike protein, which allowed for subsequent stable selection with Blasticidin and Puromycin and cloned using serial dilution

[0486] The disclosures of each and every patent, patent application, and publication cited herein are hereby incorporated herein by reference in their entirety. While this invention has been disclosed with reference to specific embodiments, it is apparent that other embodiments and variations of this invention may be devised by others skilled in the art without departing from the true spirit and scope of the invention. The appended claims are intended to be construed to include all such embodiments and equivalent variations.

What is claimed is:

1. A CRISPR RNA (crRNA) comprising a guide sequence, wherein the guide sequence is substantially complementary to a Coronavirus genomic mRNA sequence or a Coronavirus subgenomic mRNA sequence.

2. The crRNA of claim 1, wherein the guide sequence is substantially complementary to a Coronavirus leader sequence, Coronavirus S sequence, Coronavirus E sequence, Coronavirus M sequence, N sequence, or Coronavirus S2M sequence.

3. The crRNA of claim 1 or claim 2, wherein the guide sequence is substantially complementary to a sequence at least 80% homologous to a sequence selected from SEQ ID NOs: 308-314, 316-321, and 326-327.

4. The crRNA of any of claims 1-3, wherein the guide sequence comprises a sequence at least 80% homologous to a sequence selected from SEQ ID NOs: 356-391.

5. The crRNA of any of claims 1-4, wherein the crRNA further comprises a direct repeat (DR) sequence.

6. The crRNA of claim 5, wherein the DR sequence is 3′ from the guide sequence.

7. The crRNA of claim 5 or claim 6, wherein the DR sequence comprises a sequence selected from SEQ ID NOs: 291-300.

8. A tandem array comprising at least two crRNA of any of claims 1-7.

9. The tandem array of claim 8, wherein each crRNA comprises a guide sequence and a direct repeat (DR) sequence, wherein each DR sequence is different.

10. The tandem array of claim 8, wherein the tandem array comprises a sequence at least 80% identical to SEQ ID NO:402.

11. A composition comprising the crRNA of any of claims 1-8 or the tandem array of any of claims 9-10.

12. The composition of claim 11, wherein the composition further comprises a Cas protein or a nucleic acid encoding a Cas protein.

13. The composition of claim 12, wherein the Cas protein is Cas13.

14. The composition of claim 12 or claim 13, wherein the Cas protein comprises a sequence at least 80% identical to a sequence selected from SEQ ID NOs:1-46.

15. The composition of any of claims 12-14, wherein the Cas protein further comprises a localization signal or export signal.

16. The composition of claim 12, wherein the Cas protein comprises an NES, wherein the NES comprises a sequence at least 80% identical to SEQ ID NO:75-76.

17. The composition of claim 12, wherein the Cas protein comprises n nuclear localization signal (NLS), wherein the NLS comprises a sequence at least 80% identical to SEQ ID NO:67-74 and 427-1039.

18. The composition of claim 12, wherein the Cas protein comprises n localization signal, wherein the localization signal comprises a sequence at least 80% identical to SEQ ID NO:77-83.

19. A CRISPR RNA (crRNA) comprising a guide sequence, wherein the guide sequence is substantially complementary to an influenza virus genomic RNA sequence or an influenza virus subgenomic RNA sequence.

20. The crRNA of claim 19, wherein the guide sequence is substantially complementary to an influenza virus PB2 sequence, influenza virus PB1 sequence, influenza virus PA sequence, influenza virus NP sequence, or influenza virus M sequence.

21. The crRNA of claim 19 or 20, wherein the guide sequence is substantially complementary to a sequence at least 80% homologous to a sequence selected from SEQ ID NOs:328-347.

22. The crRNA of claim 19, wherein the guide sequence comprises a sequence at least 80% homologous to a sequence selected from SEQ ID NOs: 392-401.

23. The crRNA of any of claims 19-22, wherein the crRNA further comprises a direct repeat (DR) sequence.

24. The crRNA of claim 23, wherein the DR sequence is 3′ from the guide sequence.

25. The crRNA of claim 23 or claim 24, wherein the DR sequence comprises a sequence selected from SEQ ID NOs: 291-300.

26. A tandem array comprising at least two crRNA of any of claims 19-25.

27. The tandem array of claim 26, wherein each crRNA comprises a guide sequence and a direct repeat (DR) sequence, wherein each DR sequence is different.

28. The tandem array of claim 26, wherein the tandem array comprises a sequence at least 80% identical to SEQ ID NO:403 or 404.

29. A composition comprising the crRNA of any of claims 19-25 or the tandem array of any of claims 26-28.

30. The composition of claim 29, wherein the composition further comprises a Cas protein or a nucleic acid encoding a Cas protein.

31. The composition of claim 30, wherein the Cas protein is Cas13.

32. The composition of claim 30 or claim 31, wherein the Cas protein comprises a sequence at least 80% identical to a sequence selected from SEQ ID NOs:1-46.

33. The composition of any of claims 30-32, wherein the Cas protein further comprises a localization signal.

34. The composition of claim 33, wherein Cas protein comprises an NES, wherein the NES comprises a sequence at least 80% identical to SEQ ID NO:75-76.

35. The composition of claim 33, wherein the Cas protein comprises a nuclear localization signal (NLS), wherein the NLS comprises a sequence at least 80% identical to SEQ ID NO:67-74 and 427-1039.

36. The composition of claim 33, wherein the Cas protein comprises an localization signal, wherein the localization signal comprises a sequence at least 80% identical to SEQ ID NO:77-83.

37. A delivery system comprising: a packaging plasmid a transfer plasmid, and an envelope plasmid, wherein the packaging plasmid comprises a nucleic acid sequence encoding a gag-pol polyprotein; the transfer plasmid comprises a nucleic acid sequence encoding a crRNA sequence and a nucleic acid sequence encoding a Cas protein; and the envelope plasmid comprises a nucleic acid sequence encoding an envelope protein.

38. The delivery system of claim 37, wherein the envelope protein is a coronavirus spike glycoprotein.

39. The delivery system of claim 37 or claim 38, wherein the envelope protein comprises a sequence at least 80% identical to a sequence selected from SEQ ID NO:172-183.

40. The delivery system of claim 37, wherein the envelope protein comprises one or more proteins selected from influenza virus HA protein and influenza virus NA protein.

41. A method for treating a coronavirus infection, the method comprising administering to the subject: a crRNA of any of claims 1-7 or tandem array of any of claims 8-10 and a Cas protein or nucleic acid encoding a Cas protein.

42. The method of claim 41, wherein the crRNA binds to Coronavirus genome RNA or Coronavirus subgenomic RNA and the Cas protein cleaves the Coronavirus genome RNA or Coronavirus subgenomic RNA.

43. A method for treating an influenza virus infection, the method comprising administering to the subject: a crRNA of any of claims 19-25 or tandem array of any of claims 26-28 and a Cas protein or nucleic acid encoding a Cas protein.

44. The method of claim 43, wherein the crRNA binds to influenza genome RNA or influenza subgenomic RNA and the Cas protein cleaves the Coronavirus genome RNA or influenza subgenomic RNA.

45. A tandem array comprising two or more CRISPR RNAs (crRNAs).

46. The tandem array of claim 45, wherein each crRNA comprises a guide sequence and a direct repeat (DR) sequence, wherein each DR sequence is different.

47. The tandem array of claim 46, wherein each DR sequence comprises a sequence individually selected from SEQ ID NOs: 291-300.

48. A method for treating a viral infection, the method comprising administering to the subject: a tandem array of any of claims 45-47 and a Cas protein or nucleic acid encoding a Cas protein, wherein the tandem array comprises one or more crRNAs having substantial complementary to viral RNA.

49. A fusion protein comprising:
a) a CRISPR-associated (Cas) protein; and
b) a nuclear localization signal (NLS).

50. The fusion protein of claim 49, wherein the Cas protein is Cas13.

51. The fusion protein of any of claims 49-50, wherein Cas13 comprises a sequence selected from SEQ ID NOs: 1-46, or a variant thereof.

52. The fusion protein of any of claims 49-51, wherein NLS comprises a sequence selected from SEQ ID NOs: 67-74 and 427-1039, or a variant thereof.

53. The fusion protein of any of claims 49-52, wherein the fusion protein comprises a sequence selected from SEQ ID NOs:150, 151, 161, and 162, or a variant thereof.

54. A nucleic acid encoding the fusion protein of any of claims 49-53.

55. A method of decreasing the number of a target RNA or cleaving a target RNA in a subject, the method comprising administering to the subject: a fusion protein of any of claims 49-53 or the nucleic acid molecule of claim 54 and a CRISPR RNA (crRNA) acid comprising a sequence complimentary to a RNA sequence in the target RNA.

56. A fusion protein comprising:
a) a CRISPR-associated (Cas) protein; and
b) a florescent protein

57. The fusion protein of claim 56, wherein the Cas protein is catalytically dead Cas13 (dCas13).

58. The fusion protein of claim 57, wherein dCas13 comprises a sequence selected from SEQ ID NOs: 47-48, or a variant thereof.

59. The fusion protein of any of claims 56-58, wherein the fusion protein further comprises a localization signal or export signal.

60. The fusion protein of claim 59, wherein localization signal or export signal comprises a sequence selected from SEQ ID NOs:67-83 and 427-1039, or a variant thereof.

61. The fusion protein of claim any of claims 56-60, wherein the fluorescent protein is selected from the group consisting of eGFP, mCherry, sfGFP, sfGFP(1-10), sfGFP(1-10)-L-(11), and 7xS11.

62. The fusion protein of claim any of claims 56-61, wherein the fluorescent protein comprises a sequence selected from SEQ ID NO: 49-56, or a variant thereof.

63. The fusion protein of claim any of claims 56-62, wherein the fusion protein comprises a sequence selected from SEQ ID NOs: 84-149, or a variant thereof.

64. A nucleic acid molecule encoding a fusion protein of any of claims 65-63.

65. A method of visualizing a target RNA in a subject, the method comprising administering to the subject: a fusion protein of any of claims 56-63 or the nucleic acid molecule of claim 64 and a CRISPR RNA (crRNA) comprising a guide sequence acid, the guide sequence is substantially complementary to a RNA sequence in the target RNA; and visualizing the target RNA.

66. A fusion protein comprising:
a) a CRISPR-associated (Cas) protein; and
b) a localization or export signal.

67. The fusion protein of claim 66, wherein the Cas protein is Cas13.

68. The fusion protein of claim 67, wherein Cas13 comprises a sequence selected from SEQ ID NOs: 1-46, or a variant thereof.

69. The fusion protein of any of claims 66-68, wherein localization or export signal comprises a sequence selected from SEQ ID NOs:67-83 and 427-1039, or a variant thereof.

70. The fusion protein of claim any of claims 66-69, wherein the fusion protein comprises a sequence selected from SEQ ID NOs: 150-171, or a variant thereof.

71. A nucleic acid molecule encoding a fusion protein of any of claims 66-70.

72. A method of decreasing the number of a target RNA or cleaving a target RNA in a subject, the method comprising administering to the subject: a fusion protein of any of claims 66-70 or the nucleic acid molecule of claim 71 and a CRISPR RNA (crRNA) comprising a guide sequence acid, the guide sequence is substantially complementary to a RNA sequence in the target RNA; and visualizing the target RNA.

73. A synthetic coronavirus envelope protein, wherein the protein comprises an amino acid sequence selected from SEQ ID NOs:172-183, or a variant thereof.

74. A nucleic acid molecule encoding the synthetic coronavirus envelope protein of claim 73.

75. A delivery system for delivering a protein or nucleic acid comprising: a packaging plasmid a transfer plasmid, and an envelope plasmid, wherein the packaging plasmid comprises a nucleic acid sequence encoding a gag-pol polyprotein; the transfer plasmid comprises a nucleic acid sequence encoding the protein or nucleic acid to be delivered; and the envelope plasmid comprises a nucleic acid sequence encoding a synthetic coronavirus envelope of claim 73.

76. A method of delivering a gene or protein to a respiratory, vascular, renal, or cardiovascular cell type, the method comprising administering the delivery system of claim 75 to the cell.

77. A CRISPR RNA (crRNA) comprising a guide sequence, wherein the guide sequence is substantially complementary to an expanded RNA repeat.

78. The crRNA of claim 77, wherein the expanded repeat is selected from the group consisting of a CTG repeat, CCTG repeat, GGGCC repeat, CAG repeat, CGG repeat, ATTCT repeat, and TGGAA repeat.

79. The crRNA of claim 77 or claim 78, wherein the guide sequence is substantially complementary to a sequence at least 80% homologous to a sequence selected from SEQ ID NOs: 301-306.

80. The crRNA of any of claims 77-79, wherein the guide sequence comprises a sequence at least 80% homologous to a sequence selected from SEQ ID NOs: 348-354.

81. The crRNA of any of claims 77-80, wherein the crRNA further comprises a direct repeat (DR) sequence.

82. The crRNA of claim 81, wherein the DR sequence is 3′ from the guide sequence.

83. The crRNA of claim 81 or claim 82, wherein the DR sequence comprises a sequence selected from SEQ ID NOs: 291-300.

84. A tandem array comprising at least two crRNA of any of claims 77-83.

85. The tandem array of claim 84, wherein each crRNA comprises a guide sequence and a direct repeat (DR) sequence, wherein each DR sequence is different.

86. A composition comprising the crRNA of any of claims 77-83 or the tandem array of any of claims 84-85.

87. The composition of claim 86, wherein the composition further comprises a Cas protein or a nucleic acid encoding a Cas protein.

88. The composition of claim 87, wherein the Cas protein is Cas13.

89. The composition of claim 87 or claim 88, wherein the Cas protein comprises a sequence at least 80% identical to a sequence selected from SEQ ID NOs:1-46.

90. The composition of any of claims 87-89, wherein the Cas protein further comprises a localization signal or export signal.

91. The composition of claim 90, wherein the localization signal is an NES, wherein the NES comprises a sequence at least 80% identical to SEQ ID NO:75-76.

92. The composition of claim 90, wherein the localization signal is a nuclear localization signal (NLS), wherein the NLS comprises a sequence at least 80% identical to SEQ ID NO:67-74 and 427-1039.

93. The composition of claim 90, wherein the Cas protein, wherein the localization signal comprises a sequence at least 80% identical to SEQ ID NO:77-83.

94. A method of treating a disease or disorder associated with an expanded RNA repeat, the method comprising administering a crRNA of any of claims 77-83 or tandem array of any of claims 84-85 and a Cas protein or nucleic acid encoding a Cas protein.

95. The method of claim 94, wherein the disease or disorder is selected from the group consisting of Myotonic dystrophy type 1, Amyotrophic Lateral Sclerosis, Huntington's Disease, Huntington's Disease-like 2, Fragile X-associated tremor ataxia syndrome, Spinocerebellar ataxia 1, Spinocerebellar ataxia 2, Spinocerebellar ataxia 3, Spinocerebellar ataxia 6, Spinocerebellar ataxia 7, Spinocerebellar ataxia 17, Spinocerebellar ataxia 8, Spinocerebellar ataxia 10, Spinocerebellar ataxia 31, Spinal and bulbar muscular atrophy, and Dentatorubral-pallidoluysian atrophy.

The application's sequence listing, which the Patent Office published only in electronic form, follows.

SEQUENCE LISTING (1039 sequences)

SEQ ID NO: 1 - protein, 1089 aa, Artificial Sequence
  chemically synthesized
NIPALVENQKKYFGTYSVMAMLNAQTVLDHIQKVADIEGEQNENNENLWFHPVMSHLYNAKNGYDKQPEKTMFIIERLQSYFPFLKIMAENQREYSNGKYKQNRVEVNSNDIFEVLKRAFGVLKMYRDLTNHYKTYEEKLNDGCEFLTSTEQPLSGMINNYYTVALRNMNERYGYKTEDLAFIQDKRFKFVKDAYGKKKSQVNTGFFLSLQDYNGDTQKKLHLSGVGIALLICLFLDKQYINIFLSRLPIFSSYNAQSEERRIIIRSFGINSIKLPKDRIHSEKSNKSVAMDMLNEVKRCPDELFTTLSAEKQSRFRIISDDHNEVLMKRSSDRFVPLLLQYIDYGKLFDHIRFHVNMGKLRYLLKADKTCIDGQTRVRVIEQPLNGFGRLEEAETMRKQENGTFGNSGIRIRDFENMKRDDANPANYPYIVDTYTHYILENNKVEMFINDKEDSAPLLPVIEDDRYVVKTIPSCRMSTLEIPAMAFHMFLFGSKKTEKLIVDVHNRYKRLFQAMQKEEVTAENIASFGIAESDLPQKILDLISGNAHGKDVDAFIRLTVDDMLTDTERRIKRFKDDRKSIRSADNKMGKRGFKQISTGKLADFLAKDIVLFQPSVNDGENKITGLNYRIMQSAIAVYDSGDDYEAKQQFKLMFEKARLIGKGTTEPHPFLYKVFARSIPANAVEFYERYLIERKFYLTGLSNEIKKGNRVDVPFIRRDQNKWKTPAMKTLGRIYSEDLPVELPRQMFDNEIKSHLKSLPQMEGIDFNNANVTYLIAEYMKRVLDDDFQTFYQWNRNYRYMDMLKGEYDRKGSLQHCFTSVEEREGLWKERASRTERYRKQASNKIRSNRQMRNASSEEIETILDKRLSNSRNEYQKSEKVIRRYRVQDALLFLLAKKTLTELADFDGERFKLKEIMPDAEKGILSEIMPMSFTFEKGGKKYTITSEGMKLKNYGDFFVLASDKRIGNLLELVGSDIVSKEDIMEEFNKYDQCRPEISSIVFNLEKWAFDTYPELSARVDREEKVDFKSILKILLNNKNINKEQSDILRKIRNAFDHNNYPDKGVVEIKALPEIAMSIKKAFGEYAIMK

SEQ ID NO: 2 - protein, 982 aa, Artificial Sequence
  chemically synthesized
NIPALVENQKKYFGTYSVMAMLNAQTVLDHIQKVADIEGEQNENNENLWFHPVMSHLYNAKNGYDKQPEKTMFIIERLQSYFPFLKIMAENQREYSNGKYKQNRVEVNSNDIFEVLKRAFGVLKMYRDLTNHYKTYEEKLNDGCEFLTSTEQPLSGMINNYYTVALRNMNERYGYKTEDLAFIQDKRFKFVKDAYGKKKSQVNTGFFLSLQDYNGDTQKKLHLSGVGIALLICLFLDKQYINIFLSRLPIFSSYNAQSEERRIIIRSFGINSIKLPKDRIHSEKSNKSVAMDMLNEVKRCPDELFTTLSAEKQSRFRIISDDHNEVLMKRSSDRFVPLLLQYIDYGKLFDHIRFHVNMGKLRYLLKADKTCIDGQTRVRVIEQPLNGFGRLEEAETMRKQENGTFGNSGIRIRDFENMKRDDANPANYPYIVDTYTHYILENNKVEMFINDKEDSAPLLPVIEDDRYVVKTIPSCRMSTLEIPAMAFHMFLFGSKKTEKLIVDVHNRYKRLFQAMQKEEVTAENIASFGIAESDLPQKILDLISGNAHGKDVDAFIRLTVDDMLTDTERRIKRFKDDRKSIRSADNKMGKRGFKQISTGKLADFLAKDIVLFQPSVNDGENKITGLNYRIMQSAIAVYDSGDDYEAKQQFKLMFEKARLIGKGTTEPHPFLYKVFARSIPANAVEFYERYLIERKFYLTGLSNEIKKGNRVDVPFIRRDQNKWKTPAMKTLGRIYSEDLPVELPRQMFDNEIKSHLKSLPQMEGIDFNNANVTYLIAEYMKRVLDDDFQTFYQWNRNYRYMDMLKGEYDRKGSLQHCFTSVEEREGLWKERASRTERYRKQASNKIRSNRQMRNASSEEIETILDKRLSNSRNEYQKSEKVIRRYRVQDALLFLLAKKTLTELADFDGERFKLKEIMPDAEKGILSEIMPMSFTFEKGGKKYTITSEGMKLKNYGDFFVLASDKRIGNLLELVGSDIVSKED

SEQ ID NO: 3 - protein, 953 aa, Artificial Sequence
  chemically synthesized
MSNEIGAFREHQFAYAPGNEKQEEATFATYFNLALSNVEGMMFGEVESNPDKIEKSLDTLPPAILRQIASFIWLSKEDHPDKAYSTEEVKVIVTDLVRRLCFYRNYFSHCFYLDTQYFYSDELVDTTAIGEKLPYNFHHFITNRLFRYSLPEITLFRWNEGERKYEILRDGLIFFCCLFLKRGQAERFLNELRFFKRTDEEGRIKRTIFTKYCTRESHKHIGIEEQDFLIFQDIIGDLNRVPKVCDGVVDLSKENERYIKNRETSNESDENKARYRLLIREKDKFPYYLMRYIVDFGVLPCITFKQNDYSTKEGRGQFHYQDAAVAQEERCYNFVVRNGNVYYSYMPQAQNVVRISELQGTISVEELRNMVYASINGKDVNKSVEQYLYHLHLLYEKILTISGQTIKEGRVDVEDYRPLLDKLLLRPASNGEELRRELRKLLPKRVCDLLSNRFDCSEGVSAVEKRLKAILLRHEQLLLSQNPALHIDKIKSVIDYLYLFFSDDEKFRQQPTEKAHRGLKDEEFQMYHYLVGDYDSHPLALWKELEASGRLKPEMRKLTSATSLHGLYMLCLKGTVEWCRKQLMSIGKGTAKVEAIADRVGLKLYDKLKEYTPEQLEREVKLVVMHGYAAAATPKPKAQAAIPSKLTELRFYSFLGKREMSFAAFIRQDKKAQKLWLRNFYTVENIKTLQKRQAAADAACKKLYNLVGEVERVHTNDKVLVLVAQRYRERLLNVGSKCAVTLDNPERQQKLADVYEVQNAWLSIRFDDLDFTLTHVNLSNLRKAYNLIPRKHILAFKEYLDNRVKQKLCEECRNVRRKEDLCTCCSPRYSNLTSWLKENHSESSIEREAATMMLLDVERKLLSFLLDERRKAIIEYGKFIPFSALVKECRLADAGLCGIRNDVLHDNVISYADAIGKLSAYFPKEASEAVEYIRRTKEVREQRREELMANSSQ

SEQ ID NO: 4 - protein, 1111 aa, Artificial Sequence
  chemically synthesized
MKSGRREKAKSNKSSIVRVIISNFDDKQVKEIKVLYTKQGGIDVIKFKSTEKDEKGRMKFNFDCAYNRLEEEEFNSFGGKGKQSFFVTTNEDLTELHVTKRHKTTGEIIKDYTIQGKYTPIKQDRTKVTVSITDNKDHFDSNDLGDKIRLSRSLTQYTNRILLDADVMKNYREIVCSDSEKVDETINIDSQEIYKINRFLSYRSNMIIYYQMINNFLLHYDGEEDKGGNDSINLINEIWKYENKKNDEKEKIIERSYKSIEKSINQYILNHNTEVESGDKEKKIDISEERIKEDLKKTFILFSRLRHYMVHYNYKFYENLYSGKNFIIYNKDKSKSRRFSELLDLNIFKELSKIKLVKNRAVSNYLDKKTTIHVLNKNINAIKLLDIYRDICETKNGFNNFINNMMTISGEEDKEYKEMVTKHFNENMNKLSIYLENFKKHSDFKTNNKKKETYNLLKQELDEQKKLRLWFNAPYVYDIHSSKKYKELYVERKKYVDIHSKLIEAGINNDNKKKLNEINVKLCELNTEMKEMTKLNSKYRLQYKLQLAFGFILEEFNLDIDKFVSAFDKDNNLTISKFMEKRETYLSKSLDRRDNRFKKLIKDYKFRDTEDIFCSDRENNLVKLYILMYILLPVEIRGDFLGFVKKNYYDLKHVDFIDKRNNDNKDTFFHDLRLFEKNVKRLEVTSYSLSDGFLGKKSREKFGKELEKFIYKNVSIALPTNIDIKEFNKSLVLPMMKNYQIIFKLLNDIEISALFLIAKKEGNEGSITFKKVIDKVRKEDMNGNINFSQVMKMALNEKVNCQIRNSIAHINMKQLYIEPLNIYINNNQNKKTISEQMEEIIDICITKGLTGKELNKNIINDYYMKKEKLVFNLKLRKRNNLVSIDAQQKNMKEKSILNKYDLNYKDENLNIKEIILKVNDLNNKQKLLKETTEGESNYKNALSKDILLLNGIIRKNINFKIKEMILGIIQQNEYRYVNINIYDKIRKEDHNIDLKINNKYIEISCYENKSNESTDERINFKIKYMDLKVKNELLVPSCYEDIYIKKKIDLEIRYIENCKVVYIDIYYKKYNINLEFDGKTLFVKFNKDVKKNNQKVNLESNYIQNIKFIVS

SEQ ID NO: 5 - protein, 1276 aa, Artificial Sequence
  chemically synthesized
MKISKVDHVKSGIDQKLSSQRGMLYKQPQKKYEGKQLEEHVRNLSRKAKALYQVFPVSGNSKMEKELQIINSFIKNILLRLDSGKTSEEIVGYINTYSVASQISGDHIQELVDQHLKESLRKYTCVGDKRIYVPDIIVALLKSKFNSETLQYDNSELKILIDFIREDYLKEKQIKQIVHSIENNSTPLRIAEINGQKRLIPANVDNPKKSYIFEFLKEYAQSDPKGQESLLQHMRYLILLYLYGPDKITDDYCEEIEAWNFGSIVMDNEQLFSEEASMLIQDRIYVNQQIEEGRQSKDTAKVKKNKSKYRMLGDKIEHSINESVVKHYQEACKAVEEKDIPWIKYISDHVMSVYSSKNRVDLDKLSLPYLAKNTWNTWISFIAMKYVDMGKGVYHFAMSDVDKVGKQDNLIIGQIDPKFSDGISSFDYERIKAEDDLHRSMSGYIAFAVNNFARAICSDEFRKKNRKEDVLTVGLDEIPLYDNVKRKLLQYFGGASNWDDSIIDIIDDKDLVACIKENLYVARNVNFHFAGSEKVQKKQDDILEEIVRKETRDIGKHYRKVFYSNNVAVFYCDEDIIKLMNHLYQREKPYQAQIPSYNKVISKTYLPDLIFMLLKGKNRTKISDPSIMNMFRGTFYFLLKEIYYNDFLQASNLKEMFCEGLKNNVKNKKSEKPYQNFMRRFEELENMGMDFGEICQQIMTDYEQQNKQKKKTATAVMSEKDKKIRTLDNDTQKYKHFRTLLYIGLREAFIIYLKDEKNKEWYEFLREPVKREQPEEKEFVNKWKLNQYSDCSELILKDSLAAAWYVVAHFINQAQLNHLIGDIKNYIQFISDIDRRAKSTGNPVSESTEIQIERYRKILRVLEFAKFFCGQITNVLTDYYQDENDFSTHVGHYVKFEKKNMEPAHALQAFSNSLYACGKEKKKAGFYYDGMNPIVNRNITLASMYGNKKLLENAMNPVTEQDIRKYYSLMAELDSVLKNGAVCKSEDEQKNLRHFQNLKNRIELVDVLTLSELVNDLVAQLIGWVYIRERDMMYLQLGLHYIKLYFTDSVAEDSYLRTLDLEEGSIADGAVLYQIASLYSFNLPMYVKPNKSSVYCKKHVNSVATKFDIFEKEYCNGDETVIENGLRLFENINLHKDMVKFRDYLAHFKYFAKLDESILELYSKAYDFFFSYNIKLKKSVSYVLTNVLLSYFINAKLSFSTYKSSGNKTVQHRTTKISVVAQTDYFTYKLRSIVKNKNGVESIENDDRRCEVVNIAARDKEFVDEVCNVINYNSDK

SEQ ID NO: 6 - protein, 1224 aa, Artificial Sequence
  chemically synthesized
MENKTSLGNNIYYNPFKPQDKSYFAGYFNAAMENTDSVFRELGKRLKGKEYTSENFFDAIFKENISLVEYERYVKLLSDYFPMARLLDKKEVPIKERKENFKKNFKGIIKAVRDLRNFYTHKEHGEVEITDEIFGVLDEMLKSTVLTVKKKKVKTDKTKEILKKSIEKQLDILCQKKLEYLRDTARKIEEKRRNQRERGEKELVAPFKYSDKRDDLIAAIYNDAFDVYIDKKKDSLKESSKAKYNTKSDPQQEEGDLKIPISKNGVVFLLSLFLTKQEIHAFKSKIAGFKATVIDEATVSEATVSHGKNSICFMATHEIFSHLAYKKLKRKVRTAEINYGEAENAEQLSVYAKETLMMQMLDELSKVPDVVYQNLSEDVQKTFIEDWNEYLKENNGDVGTMEEEQVIHPVIRKRYEDKFNYFAIRFLDEFAQFPTLRFQVHLGNYLHDSRPKENLISDRRIKEKITVFGRLSELEHKKALFIKNTETNEDREHYWEIFPNPNYDFPKENISVNDKDFPIAGSILDREKQPVAGKIGIKVKLLNQQYVSEVDKAVKAHQLKQRKASKPSIQNIIEEIVPINESNPKEAIVFGGQPTAYLSMNDIHSILYEFFDKWEKKKEKLEKKGEKELRKEIGKELEKKIVGKIQAQIQQIIDKDTNAKILKPYQDGNSTAIDKEKLIKDLKQEQNILQKLKDEQTVREKEYNDFIAYQDKNREINKVRDRNHKQYLKDNLKRKYPEAPARKEVLYYREKGKVAVWLANDIKRFMPTDFKNEWKGEQHSLLQKSLAYYEQCKEELKNLLPEKVFQHLPFKLGGYFQQKYLYQFYTCYLDKRLEYISGLVQQAENFKSENKVFKKVENECFKFLKKQNYTHKELDARVQSILGYPIFLERGFMDEKPTIIKGKTFKGNEALFADWFRYYKEYQNFQTFYDTENYPLVELEKKQADRKRKTKIYQQKKNDVFTLLMAKHIFKSVFKQDSIDQFSLEDLYQSREERLGNQERARQTGERNTNYIWNKTVDLKLCDGKITVENVKLKNVGDFIKYEYDQRVQAFLKYEENIEWQAFLIKESKEEENYPYVVEREIEQYEKVRREELLKEVHLIEEYILEKVKDKEILKKGDNQNFKYYILNGLLKQLKNEDVESYKVFNLNTEPEDVNINQLKQEATDLEQKAFVLTYIRNKFAHNQLPKKEFWDYCQEKYGKIEKEKTYAEYFAEVFKKEKEALIK

SEQ ID NO: 7 - protein, 1385 aa, Artificial Sequence
  chemically synthesized
MKFSKVDHTRSAVGIQKATDSVHGMLYTDPKKQEVNDLDKRFDQLNVKAKRLYNVFNQSKAEEDDDEKRFGKVVKKLNRELKDLLFHREVSRYNSIGNAKYNYYGIKSNPEEIVSNLGMVESLKGERDPQKVISKLLLYYLRKGLKPGTDGLRMILEASCGLRKLSGDEKELKVFLQTLDEDFEKKTFKKNLIRSIENQNMAVQPSNEGDPIIGITQGRFNSQKNEEKSAIERMMSMYADLNEDHREDVLRKLRRLNVLYFNVDTEKTEEPTLPGEVDTNPVFEVWHDHEKGKENDRQFATFAKILTEDRETRKKEKLAVKEALNDLKSAIRDHNIMAYRCSIKVTEQDKDGLFFEDQRINRFWIHHIESAVERILASINPEKLYKLRIGYLGEKVWKDLLNYLSIKYIAVGKAVFHFAMEDLGKTGQDIELGKLSNSVSGGLTSFDYEQIRADETLQRQLSVEVAFAANNLFRAVVGQTGKKIEQSKSEENEEDFLLWKAEKIAESIKKEGEGNTLKSILQFFGGASSWDLNHFCAAYGNESSALGYETKFADDLRKAIYSLRNETFHFTTLNKGSFDWNAKLIGDMFSHEAATGIAVERTRFYSNNLPMFYRESDLKRIMDHLYNTYHPRASQVPSFNSVFVRKNFRLFLSNTLNTNTSFDTEVYQKWESGVYYLFKEIYYNSFLPSGDAHHLFFEGLRRIRKEADNLPIVGKEAKKRNAVQDFGRRCDELKNLSLSAICQMIMTEYNEQNNGNRKVKSTREDKRKPDIFQHYKMLLLRTLQEAFAIYIRREEFKFIFDLPKTLYVMKPVEEFLPNWKSGMFDSLVERVKQSPDLQRWYVLCKFLNGRLLNQLSGVIRSYIQFAGDIQRRAKANHNRLYMDNTQRVEYYSNVLEVVDFCIKGTSRFSNVFSDYFRDEDAYADYLDNYLQFKDEKIAEVSSFAALKTFCNEEEVKAGIYMDGENPVMQRNIVMAKLFGPDEVLKNVVPKVTREEIEEYYQLEKQIAPYRQNGYCKSEEDQKKLLRFQRIKNRVEFQTITEFSEIINELLGQLISWSFLRERDLLYFQLGFHYLCLHNDTEKPAEYKEISREDGTVIRNAILHQVAAMYVGGLPVYTLADKKLAAFEKGEADCKLSISKDTAGAGKKIKDFFRYSKYVLIKDRMLTDQNQKYTIYLAGLELFENTDEHDNITDVRKYVDHFKYYATSDENAMSILDLYSEIHDRFFTYDMKYQKNVANMLENILLRHFVLIRPEFFTGSKKVGEGKKITCKARAQIEIAENGMRSEDFTYKLSDGKKNISTCMIAARDQKYLNTVARLLYYPHEAKKSIVDTREKKNNKKTNRGDGTFNKQKGTARKEKDNGPREFNDTGFSNTPFAGFDPFRNS

SEQ ID NO: 8 - protein, 1199 aa, Artificial Sequence
  chemically synthesized
MKNIQRLGKGNEFSPFKKEDKFYFGGFLNLANNNIEDFFKEIITRFGIVITDENKKPKETFGEKILNEIFKKDISIVDYEKWVNIFADYFPFTKYLSLYLEEMQFKNRVICFRDVMKELLKTVEALRNFYTHYDHEPIKIEDRVFYFLDKVLLDVSLTVKNKYLKTDKTKEFLNQHIGEELKELCKQRKDYLVGKGKRIDKESEIINGIYNNAFKDFICKREKQDDKENHNSVEKILCNKEPQNKKQKSSATVWELCSKSSSKYTEKSFPNRENDKHCLEVPISQKGIVFLLSFFLNKGEIYALTSNIKGFKAKITKEEPVTYDKNSIRYMATHRMFSFLAYKGLKRKIRTSEINYNEDGQASSTYEKETLMLQMLDELNKVPDVVYQNLSEDVQKTFIEDWNEYLKENNGDVGTMEEEQVIHPVIRKRYEDKFNYFAIRFLDEFAQFPTLRFQVHLGNYLCDKRTKQICDTTTEREVKKKITVFGRLSELENKKAIFLNEREEIKGWEVFPNPSYDFPKENISVNYKDFPIVGSILDREKQPVSNKIGIRVKIADELQREIDKAIKEKKLRNPKNRKANQDEKQKERLVNEIVSTNSNEQGEPVVFIGQPTAYLSMNDIHSVLYEFLINKISGEALETKIVEKIETQIKQIIGKDATTKILKPYTNANSNSINREKLLRDLEQEQQILKTLLEEQQQREKDKKDKKSKRKHELYPSEKGKVAVWLANDIKRFMPKAFKEQWRGYHHSLLQKYLAYYEQSKEELKNLLPKEVFKHFPFKLKGYFQQQYLNQFYTDYLKRRLSYVNELLLNIQNFKNDKDALKATEKECFKFFRKQNYIINPINIQIQSILVYPIFLKRGFLDEKPTMIDREKFKENKDTELADWFMHYKNYKEDNYQKFYAYPLEKVEEKEKFKRNKQINKQKKNDVYTLMMVEYIIQKIFGDKFVEENPLVLKGIFQSKAERQQNNTHAATTQERNLNGILNQPKDIKIQGKITVKGVKLKDIGNFRKYEIDQRVNTFLDYEPRKEWMAYLPNDWKEKEKQGQLPPNNVIDRQISKYETVRSKILLKDVQELEKIISDEIKEEHRHDLKQGKYYNFKYYILNGLLRQLKNENVENYKVFKLNTNPEKVNITQLKQEATDLEQKAFVLTYIRNKFAHNQLPKKEFWDYCQEKYGKIEKEKTYAEYFAEVFKREKEALIK

SEQ ID NO: 9 - protein, 1164 aa, Artificial Sequence
  chemically synthesized
MRMTKVKINGSPVSMNRSKLNGHLVWNGTTNTVNILTKKEQSFAASFLNKTLVKADQVKGYKVLAENIFIIFEQLEKSNSEKPSVYLNNIRRLKEAGLKRFFKSKYHEEIKYTSEKNQSVPTKLNLIPLFFNAVDRIQEDKFDEKNWSYFCKEMSPYLDYKKSYLNRKKEILANSIQQNRGFSMPTAEEPNLLSKRKQLFQQWAMKFQESPLIQQNNFAVEQFNKEFANKINELAAVYNVDELCTAITEKLMNFDKDKSNKTRNFEIKKLWKQHPHNKDKALIKLFNQEGNEALNQFNIELGKYFEHYFPKTGKKESAESYYLNPQTIIKTVGYQLRNAFVQYLLQVGKLHQYNKGVLDSQTLQEIGMYEGFQTKFMDACVFASSSLRNIIQATTNEDILTREKFKKELEKNVELKHDLFFKTEIVEERDENPAKKIAMTPNELDLWAIRGAVQRVRNQIFHQQINKRHEPNQLKVGSFENGDLGNVSYQKTIYQKLFDAEIKDIEIYFAEKIKSSGALEQYSMKDLEKLFSNKELTLSLGGQVVAFAPSYKKLYKQGYFYQNEKTIELEQFTDYDFSNDVFKANYYLIKLIYHYVFLPQFSQANNKLFKDTVHYVIQQNKELNTTEKDKKNNKKIRKYAFEQVKLMKNESPEKYMQYLQREMQEERTIKEAKKTNEEKPNYNFEKLLIQIFIKGFDTFLRNFDLNLNPAEELVGTVKEKAEGLRKRKERIAKILNVDEQIKTGDEEIAFWIFAKLLDARHLSELRNEMIKFKQSSVKKGLIKNGDLIEQMQPILELCILSNDSESMEKESFDKIEVFLEKVELAKNEPYMQEDKLTPVKFRFMKQLEKYQTRNFIENLVIENPEFKVSEKIVLNWHEEKEKIADLVDKRTKLHEEWASKAREIEEYNEKIKKNKSKKLDKPAEFAKFAEYKIICEAIENFNRLDHKVRLTYLKNLHYLMIDLMGRMVGFSVLFERDFVYMGRSYSALKKQSIYLNDYDTFANIRDWEVNENKHLFGTSSSDLTFQETAEFKNLKKPMENQLKALLGVTNHSFEIRNNIAHLHVLRNDGKGEGVSLLSCMNDLRKLMSYDRKLKNAVTKAIIKILDKHGMILKLTNNDHTKPFEIESLKPKKIIHLEKSNHSFPMDQVSQEYCDLVKKMLVFTN

SEQ ID NO: 10 - protein, 1175 aa, Artificial Sequence
  chemically synthesized
MRITKVKIKLDNKLYQVTMQKEEKYGTLKLNEESRKSTAEILRLKKASFNKSFHSKTINSQKENKNATIKKNGDYISQIFEKLVGVDTNKNIRKPKMSLTDLKDLPKKDLALFIKRKFKNDDIVEIKNLDLISLFYNALQKVPGEHFTDESWADFCQEMMPYREYKNKFIERKIILLANSIEQNKGFSINPETFSKRKRVLHQWAIEVQERGDFSILDEKLSKLAEIYNFKKMCKRVQDELNDLEKSMKKGKNPEKEKEAYKKQKNFKIKTIWKDYPYKTHIGLIEKIKENEELNQFNIEIGKYFEHYFPIKKERCTEDEPYYLNSETIATTVNYQLKNALISYLMQIGKYKQFGLENQVLDSKKLQEIGIYEGFQTKFMDACVFATSSLKNIIEPMRSGDILGKREFKEAIATSSFVNYHHFFPYFPFELKGMKDRESELIPFGEQTEAKQMQNIWALRGSVQQIRNEIFHSFDKNQKFNLPQLDKSNFEFDASENSTGKSQSYIETDYKFLFEAEKNQLEQFFIERIKSSGALEYYPLKSLEKLFAKKEMKFSLGSQVVAFAPSYKKLVKKGHSYQTATEGTANYLGLSYYNRYELKEESFQAQYYLLKLIYQYVFLPNFSQGNSPAFRETVKAILRINKDEARKKMKKNKKFLRKYAFEQVREMEFKETPDQYMSYLQSEMREEKVRKAEKNDKGFEKNITMNFEKLLMQIFVKGFDVFLTTFAGKELLLSSEEKVIKETEISLSKKINEREKTLKASIQVEHQLVATNSAISYWLFCKLLDSRHLNELRNEMIKFKQSRIKFNHTQHAELIQNLLPIVELTILSNDYDEKNDSQNVDVSAYFEDKSLYETAPYVQTDDRTRVSFRPILKLEKYHTKSLIEALLKDNPQFRVAATDIQEWMHKREEIGELVEKRKNLHTEWAEGQQTLGAEKREEYRDYCKKIDRFNWKANKVTLTYLSQLHYLITDLLGRMVGFSALFERDLVYFSRSFSELGGETYHISDYKNLSGVLRLNAEVKPIKIKNIKVIDNEENPYKGNEPEVKPFLDRLHAYLENVIGIKAVHGKIRNQTAHLSVLQLELSMIESMNNLRDLMAYDRKLKNAVTKSMIKILDKHGMILKLKIDENHKNFEIESLIPKEIIHLKDKAIKTNQVSEEYCQLVLALLTTNPGNQLN

SEQ ID NO: 11 - protein, 1373 aa, Artificial Sequence
  chemically synthesized
MKISKESHKRTAVAVMEDRVGGVVYVPGGSGIDLSNNLKKRSMDTKSLYNVFNQIQAGTAPSEYEWKDYLSEAENKKREAQKMIQKANYELRRECEDYAKKANLAVSRIIFSKKPKKIFSDDDIISHMKKQRLSKFKGRMEDFVLIALRKSLVVSTYNQEVFDSRKAATVFLKNIGKKNISADDERQIKQLMALIREDYDKWNPDKDSSDKKESSGTKVIRSIEHQNMVIQPEKNKLSLSKISNVGKKTKTKQKEKAGLDAFLKEYAQIDENSRMEYLKKLRRLLDTYFAAPSSYIKGAAVSLPENINFSSELNVWERHEAAKKVNINFVEIPESLLNAEQNNNKINKVEQEHSLEQLRTDIRRRNITCYHFANALAADERYHTLFFENMAMNQFWIHHMENAVERILKKCNVGTLFKLRIGYLSEKVWKDMLNLLSIKYIALGKAVYHFALDDIWKADIWKDASDKNSGKINDLTLKGISSFDYEMVKAQEDLQREMAVGVAFSTNNLARVTCKMDDLSDAESDFLLWNKEAIRRHVKYTEKGEILSAILQFFGGRSLWDESLFEKAYSDSNYELKFLDDLKRAIYAARNETFHFKTAAIDGGSWNTRLFGSLFEKEAGLCLNVEKNKFYSNNLVLFYKQEDLRVFLDKLYGKECSRAAQIPSYNTILPRKSFSDFMKQLLGLKEPVYGSAILDQWYSACYYLFKEVYYNLFLQDSSAKALFEKAVKALKGADKKQEKAVESFRKRYWEISKNASLAEICQSYITEYNQQNNKERKVRSANDGMFNEPIYQHYKMLLKEALKMAFASYIKNDKELKFVYKPTEKLFEVSQDNFLPNWNSEKYNTLISEVKNSPDLQKWYIVGKFMNARMLNLLLGSMRSYLQYVSDIQKRAAGLGENQLHLSAENVGQVKKWIQVLEVCLLLSVRISDKFTDYFKDEEEYASYLKEYVDFEDSAMPSDYSALLAFSNEGKIDLYVDASNPKVNRNIIQAKLYAPDMVLKKVVKKISQDECKEFNEKKEQIMQFKNKGDEVSWEEQQKILEYQKLKNRVELRDLSEYGELINELLGQLINWSYLRERDLLYFQLGFHYSCLMNESKKPDAYKTIRRGTVSIENAVLYQIIAMYINGFPVYAPEKGELKPQCKTGSAGQKIRAFCQWASMVEKKKYELYNAGLELFEVVKEHDNIIDLRNKIDHFKYYQGNDSILALYGEIFDRFFTYDMKYRNNVLNHLQNILLRHNVIIKPIISKDKKEVGRGKMKDRAAFLLEEVSSDRFTYKVKEGERKIDAKNRLYLETVRDILYFPNRAVNDKGEDVIICSKKAQDLNEKKADRDKNHDKSKDTNQKKEGKNQEEKSENKEPYSDRMTWKPFAGIKLE

SEQ ID NO: 12 - protein, 1344 aa, Artificial Sequence
  chemically synthesized
MLRRDKEVKKLYNVFNQIQVGTKPKKWNNDEKLSPEENERRAQQKNIKMKNYKWREACSKYVESSQRIINDVIFYSYRKAKNKLRYMRKNEDILKKMQEAEKLSKFSGGKLEDFVAYTLRKSLVVSKYDTQEFDSLAAMVVFLECIGKNNISDHEREIVCKLLELIRKDFSKLDPNVKGSQGANIVRSVRNQNMIVQPQGDRFLFPQVYAKENETVTNKNVEKEGLNEFLLNYANLDDEKRAESLRKLRRILDVYFSAPNHYEKDMDITLSDNIEKEKFNVWEKHECGKKETGLFVDIPDVLMEAEAENIKLDAVVEKRERKVLNDRVRKQNIICYRYTRAVVEKYNSNEPLFFENNAINQYWIHHIENAVERILKNCKAGKLFKLRKGYLAEKVWKDAINLISIKYIALGKAVYNFALDDIWKDKKNKELGIVDERIRNGITSFDYEMIKAHENLQRELAVDIAFSVNNLARAVCDMSNLGNKESDFLLWKRNDIADKLKNKDDMASVSAVLQFFGGKSSWDINIFKDAYKGKKKYNYEVRFIDDLRKAIYCARNENFHFKTALVNDEKWNTELFGKIFERETEFCLNVEKDRFYSNNLYMFYQVSELRNMLDHLYSRSVSRAAQVPSYNSVIVRTAFPEYITNVLGYQKPSYDADTLGKWYSACYYLLKEIYYNSFLQSDRALQLFEKSVKTLSWDDKKQQRAVDNFKDHFSDIKSACTSLAQVCQIYMTEYNQQNNQIKKVRSSNDSIFDQPVYQHYKVLLKKAIANAFADYLKNNKDLFGFIGKPFKANEIREIDKEQFLPDWTSRKYEALCIEVSGSQELQKWYIVGKFLNARSLNLMVGSMRSYIQYVTDIKRRAASIGNELHVSVHDVEKVEKWVQVIEVCSLLASRTSNQFEDYFNDKDDYARYLKSYVDFSNVDMPSEYSALVDFSNEEQSDLYVDPKNPKVNRNIVHSKLFAADHILRDIVEPVSKDNIEEFYSQKAEIAYCKIKGKEITAEEQKAVLKYQKLKNRVELRDIVEYGEIINELLGQLINWSFMRERDLLYFQLGFHYDCLRNDSKKPEGYKNIKVDENSIKDAILYQIIGMYVNGVTVYAPEKDGDKLKEQCVKGGVGVKVSAFHRYSKYLGLNEKTLYNAGLEIFEVVAEHEDIINLRNGIDHFKYYLGDYRSMLSIYSEVFDRFFTYDIKYQKNVLNLLQNILLRHNVIVEPILESGFKTIGEQTKPGAKLSIRSIKSDTFQYKVKGGTLITDAKDERYLETIRKILYYAENEEDNLKKSVVVTNADKYEKNKESDDQNKQKEKKNKDNKGKKNEETKSDAEKNNNERLSYNPFANLNFKLSN

SEQ ID NO: 13 - protein, 954 aa, Artificial Sequence
  chemically synthesized
MGKKIHARDLREQRKTDRTEKFADQNKKREAERAVPKKDAAVSVKSVSSVSSKKDNVTKSMAKAAGVKSVFAVGNTVYMTSFGRGNDAVLEQKIVDTSHEPLNIDDPAYQLNVVTMNGYSVTGHRGETVSAVTDNPLRRFNGRKKDEPEQSVPTDMLCLKPTLEKKFFGKEFDDNIHIQLIYNILDIEKILAVYSTNAIYALNNMSADENIENSDFFMKRTTDETFDDFEKKKESTNSREKADFDAFEKFIGNYRLAYFADAFYVNKKNPKGKAKNVLREDKELYSVLTLIGKLRHWCVHSEEGRAEFWLYKLDELKDDFKNVLDVVYNRPVEEINNRFIENNKVNIQILGSVYKNTDIAELVRSYYEFLITKKYKNMGFSIKKLRESMLEGKGYADKEYDSVRNKLYQMTDFILYTGYINEDSDRADDLVNTLRSSLKEDDKTTVYCKEADYLWKKYRESIREVADALDGDNIKKLSKSNIEIQEDKLRKCFISYADSVSEFTKLIYLLTRFLSGKEINDLVTTLINKFDNIRSFLEIMDELGLDRTFTAEYSFFEGSTKYLAELVELNSFVKSCSFDINAKRTMYRDALDILGIESDKTEEDIEKMIDNILQIDANGDKKLKKNNGLRNFIASNVIDSNRFKYLVRYGNPKKIRETAKCKPAVRFVLNEIPDAQIERYYEACCPKNTALCSANKRREKLADMIAEIKFENFSDAGNYQKANVTSRTSEAEIKRKNQAIIRLYLTVMYIMLKNLVNVNARYVIAFHCVERDTKLYAESGLEVGNIEKNKTNLTMAVMGVKLENGIIKTEFDKSFAENAANRYLRNARWYKLILDNLKKSERAVVNEFRNTVCHLNAIRNININIKEIKEVENYFALYHYLIQKHLENRFADKKVERDTGDFISKLEEHKTYCKDFVKAYCTPFGYNLVRYKNLTIDGLFDKNYPGKDDSDEQK

SEQ ID NO: 14 - protein, 1150 aa, Artificial Sequence
  chemically synthesized
MENLNKILDKENEICISKIFNTKGIAAPITEKALDNIKSKQKNDLNKEARLHYFSIGHSFKQIDTKKVFDYVLIEELKDEKPLKFITLQKDFFTKEFSIKLQKLINSIRNINNHYVHNFNDINLNKIDSNVFHFLKESFELAIIEKYYKVNKKYPLDNEIVLFLKELFIKDENTALLNYFTNLSKDEAIEYILTFTITENKIWNINNEHNILNIEKGKYLTFEAMLFLITIFLYKNEANHLLPKLYDFKNNKSKQELFTFFSKKFTSQDIDAEEGHLIKFRDMIQYLNHYPTAWNNDLKLESENKNKIMTTKLIDSIIEFELNSNYPSFATDIQFKKEAKAFLFASNKKRNQTSFSNKSYNEEIRHNPHIKQYRDEIASALTPISFNVKEDKFKIFVKKHVLEEYFPNSIGYEKFLEYNDFTEKEKEDFGLKLYSNPKTNKLIERIDNHKLVKSHGRNQDRFMDFSMRFLAENNYFGKDAFFKCYKFYDTQEQDEFLQSNENNDDVKFHKGKVTTYIKYEEHLKNYSYWDCPFVEENNSMSVKISIGSEEKILKIQRNLMIYFLENALYNENVENQGYKLVNNYYRELKKDVEESIASLDLIKSNPDFKSKYKKILPKRLLHNYAPAKQDKAPENAFETLLKKADFREEQYKKLLKKAEHEKNKEDFVKRNKGKQFKLHFIRKACQMMYFKEKYNTLKEGNAAFEKKDPVIEKRKNKEHEFGHHKNLNITREEFNDYCKWMFAFNGNDSYKKYLRDLFSEKHFFDNQEYKNLFESSVNLEAFYAKTKELFKKWIETNKPTNNENRYTLENYKNLILQKQVFINVYHFSKYLIDKNLLNSENNVIQYKSLENVEYLISDFYFQSKLSIDQYKTCGKLFNKLKSNKLEDCLLYEIAYNYIDKKNVHKIDIQKILTSKIILTINDANTPYKISVPFNKLERYTEMIAIKNQNNLKARFLIDLPLYLSKNKIKKGKDSAGYEIIIKNDLEIEDINTINNKIINDSVKFTEVLMELEKYFILKDKCILSKNYIDNSEIPSLKQFSKVWIKENENEIINYRNIACHFHLPLLETFDNLLLNVEQKFIKEELQNVSTINDLSKPQEYLILLFIKFKHNNFYLNLFNKNESKTIKNDKEVKKNRVLQKFINQVILKKK

SEQ ID NO: 15 - protein, 1110 aa, Artificial Sequence
  chemically synthesized
MKVRYRKQAQLDTFIIKTEIVNNDIFIKSIIEKAREKYRYSFLFDGEEKYHFKNKSSVEIVKNDIFSQTPDNMIRNYKITLKISEKNPRVVEAEIEDLMNSTILKDGRRSARREKSMTERKLIEEKVAENYSLLANCPIEEVDSIKIYKIKRFLTYRSNMLLYFASINSFLCEGIKGKDNETEEIWHLKDNDVRKEKVKENFKNKLIQSTENYNSSLKNQIEEKEKLSSKEFKKGAFYRTIIKKLQQERIKELSEKSLTEDCEKIIKLYSELRHPLMHYDYQYFENLFENKENSELTKNLNLDIFKSLPLVRKMKLNNKVNYLEDNDTLFVLQKTKKAKTLYQIYDALCEQKNGFNKFINDFFVSDGEENTVFKQIINEKFQSEMEFLEKRISESEKKNEKLKKKLDSMKAHFRNINSEDTKEAYFWDIHSSRNYKTKYNERKNLVNEYTKLLGSSKEKKLLREEITKINRQLLKLKQEMEEITKKNSLFRLEYKMKIAFGFLFCEFDGNISKFKDEFDASNQEKIIQYHKNGEKYLTSFLKEEEKEKFNLEKMQKIIQKTEEEDWLLPETKNNLFKFYLLTYLLLPYELKGDFLGFVKKHYYDIKNVDFMDENQNNIQVSQTVEKQEDYFYHKIRLFEKNTKKYEIVKYSIVPNEKLKQYFEDLGIDIKYLTGSVESGEKWLGENLGIDIKYLTVEQKSEVSEEKNKKVSLKNNGMFNKTILLFVFKYYQIAFKLFNDIELYSLFFLREKSEKPFEVFLEELKDKMIGKQLNFGQLLYVVYEVLVKNKDLDKILSKKIDYRKDKSFSPEIAYLRNFLSHLNYSKFLDNFMKINTNKSDENKEVLIPSIKIQKMIQFIEKCNLQNQIDFDFNFVNDFYMRKEKMFFIQLKQIFPDINSTEKQKKSEKEEILRKRYHLINKKNEQIKDEHEAQSQLYEKILSLQKIFSCDKNNFYRRLKEEKLLFLEKQGKKKISMKEIKDKIASDISDLLGILKKEITRDIKDKLTEKFRYCEEKLLNISFYNHQDKKKEEGIRVFLIRDKNSDNFKFESILDDGSNKIFISKNGKEITIQCCDKVLETLMIEKNTLKISSNGKIISLIPHYSYSIDVKY

SEQ ID NO: 16 - protein, 1111 aa, Artificial Sequence
  chemically synthesized
MEKFRRQNRSSIIKIIISNYDTKGIKELKVRYRKQAQLDTFIIKTEIVNNDIFIKSIIEKAREKYRYSFLFDGEEKYHFKNKSSVEIVKKDIFSQTPDNMIRNYKITLKISEKNPRVVEAEIEDLMNSTILKDGRRSARREKSMTERKLIEEKVAENYSLLANCPMEEVDSIKIYKIKRFLTYRSNMLLYFASINSFLCEGIKGKDNETEEIWHLKDNDVRKEKVKENFKNKLIQSTENYNSSLKNQIEEKEKLLRKESKKGAFYRTIIKKLQQERIKELSEKSLTEDCEKIIKLYSELRHPLMHYDYQYFENLFENKENSELTKNLNLDIFKSLPLVRKMKLNNKVNYLEDNDTLFVLQKTKKAKTLYQIYDALCEQKNGFNKFINDFFVSDGEENTVFKQIINEKFQSEIEFLEKRISESEKKNEKLKKKLDSMKAHFRNINSEDTKEAYFWDIHSSRNYKTKYNERKNLVNEYTELLGSSKEKKLLREEITKINRQLLKLKQEMEEITKKNSLFRLEYKMKMAFGFLFCEFDGNISRFKDEFDASNQEKIIQYHKNGEKYLTYFLKEEEKEKFNLKKLQETIQKTGEENWLLPQNKNNLFKFYLLTYLLLPYELKGDFLGFVKKHYYDIKNVDFMDENQSSKIIESKEDDFYHKIRLFEKNTKKYEIVKYSIVPDKKLKQYFKDLGIDTKYLILDQKSEVSGEKNKKVSLKNNGMFNKTILLFVFKYYQIAFKLFNDIELYSLFFLREKSGKPFEVFLKELKDKMIGKQLNFGQLLYVVYEVLVKNKDLSEILSERIDYRKDMCFSAEIADLRNFLSHLNYSKFLDNFMKINTNKSDENKEVLIPSIKIQKMIKFIEECNLQSQIDFDFNFVNDFYMRKEKMFFIQLKQIFPDINSTEKQKMNEKEEILRNRYHLTDKKNEQIKDEHEAQSQLYEKILSLQKIYSSDKNNFYGRLKEEKLLFLEKQEKKKLSMEEIKDKIAGDISDLLGILKKEITRDIKDKLTEKFRYCEEKLLNLSFYNHQDKKKEESIRVFLIRDKNSDNFKFESILDDGSNKIFISKNGKEITIQCCDKVLETLIIEKNTLKISSNGKIISLIPHYSYSIDVKY

SEQ ID NO: 17 - protein, 668 aa, Artificial Sequence
  chemically synthesized
MTEKKSIIFKNKSSVEIVKKDIFSQTPDNMIRNYKITLKISEKNPRVVEAEIEDLMNSTILKDGRRSARREKSMTERKLIEEKVAENYSLLANCPMEEVDSIKIYKIKRFLTYRSNMLLYFASINSFLCEGIKGKDNETEEIWHLKDNDVRKEKVKENFKNKLIQSTENYNSSLKNQIEEKEKLLRKESKKGAFYRTIIKKLQQERIKELSEKSLTEDCEKIIKLYSELRHPLMHYDYQYFENLFENKENSELTKNLNLDIFKSLPLVRKMKLNNKVNYLEDNDTLFVLQKTKKAKTLYQIYDALCEQKNGFNKFINDFFVSDGEENTVFKQIINEKFQSEMEFLEKRISESEKKNEKLKKKFDSMKAHFHNINSEDTKEAYFWDIHSSSNYKTKYNERKNLVNEYTELLGSSKEKKLLREEITQINRKLLKLKQEMEEITKKNSLFRLEYKMKIAFGFLFCEFDGNISKFKDEFDASNQEKIIQYHKNGEKYLTYFLKEEEKEKFNLEKMQKIIQKTEEEDWLLPETKNNLFKFYLLTYLLLPYELKGDFLGFVKKHYYDIKNVDFMDENQNNIQVSQTVEKQEDYFYHKIRLFEKNTKKYEIVKYSIVPNEKLKQYFEDLGIDIKYLTGSVESGEKWLGENLGIDIKYLTVEQKSEVSEEKIKKFL

SEQ ID NO: 18 - protein, 1115 aa, Artificial Sequence
  chemically synthesized
MEKFRRQNRNSIIKIIISNYDTKGIKELKVRYRKQAQLDTFIIKTEIVNNDIFIKSIIEKAREKYRYSFLFDGEEKYHFKNKSSVEIVKKDIFSQTPDNMIRNYKITLKISEKNPRVVEAEIEDLMNSTILKDGRRSARREKSMTERKLIEEKVAKNYSLLANCPMEEVDSIKIYKIKRFLTYRSNMLLYFASINSFLCEGIKGKDNETEEIWHLKDNDVRKEKVRENFKNKLIQSTENYNSSLKNQIEEKEKLLRKEFKKGAFYRTIIKKLQQERIKELSEKSLTEDCEKIIKLYSKLRHSLMHYDYQYFENLFENKKNDDLMKDLNLDLFKSLPLIRKMKLNNKVNYLEDGDTLFVLQKTKKAKTLYQIYDALCEQKNGFNKFINDFFVSDGEENTVFKQIINEKFQSEMEFLEKRISESEKKNEKLKKKLDSMKAHFRNINSEDTKEAYFWDIHSSRNYKTKYNERKNLVNEYTELLGSSKEKKLLREEITKINRQLLKLKQEMEEITKKNSLFRLEYKMKIAFGFLFCEFDGNISKFKDEFDASNQEKIIQYHKNGEKYLTSFLKEEEKEKFNLEKMQKIIQKTEEEDWLLPETKNNLFKFYLLTYLLLPYELKGDFLGFVKKHYYDIKNVDFIDENQNNIQVSQTVEKQEDYFYHKIRLFEKNTKKYEIVKYSIVPNEKLKQYFEDLGIDIKYLTVEQKSEVSEEKNKKVSLKNNGMFNKTILLFVFKYYQIAFKLFNDIELYSLFFLREKSGKPLEIFRKELESKMKDGYLNFGQLLYVVYEVLVKNKDLDKILSKKIDYRKDKSFSPEIAYLRNFLSHLNYSKFLDNFMKINTNKSDENKEVLIPSIKIQKMIQFIEKCNLQNQIDFDFNFVNDFYMRKEKMFFIQLKQIFPDINSTEKQKMNEKEEILRNRYHLTDKKNEQIKDEHEAQSQLYEKILSLQKIYSSDKNNFYGRLKEEKLLFLEKQGKKKLSMEEIKDKIAGDISDLLGILKKEITRDIKDKLTEKFRYCEEKLLNLSFYNHQDKKKEESIRVFLIRDKNSDNFKFESILDDGSNKIFISKNGKEITIQCCDKVLETLIIEKNTLKISSNGKIISLIPHYSYSIDVKY

SEQ ID NO: 19 - protein, 1121 aa, Artificial Sequence
  chemically synthesized
MGKPNRSSIIKIIISNYDNKGIKEVKVRYNKQAQLDTFLIKSELKDGKFILYSIVDKAREKYRYSFEIDKTNINKNEILIIKKDIYSNKEDKVIRKYILSFEVSEKNDRTIVTKIKDCLETQKKEKFERENTRRLISETERKLLSEETQKTYSKIACCSPEDIDSVKIYKIKRYLAYRSNMLLFFSLINDIFVKGVVKDNGEEVGEIWRIIDSKEIDEKKTYDLLVENFKKRMSQEFINYKQSIENKIEKNTNKIKEIEQKLKKEKYKKEINRLKKQLIELNRENDLLEKDKIELSDEEIREDIEKILKIYSDLRHKLMHYNYQYFENLFENKKISKEKNEDVNLTELLDLNLFRYLPLVRQLKLENKTNYLEKEDKITVLGVSDSAIKYYSYYNFLCEQKNGFNNFINSFFSNDGEENKSFKEKINLSLEKEIEIMEKETNEKIKEINKNELQLMKEQKELGTAYVLDIHSLNDYKISHNERNKNVKLQNDIMNGNRDKNALDKINKKLVELKIKMDKITKRNSILRLKYKLQVAYGFLMEEYKGNIKKFKDEFDISKEKIKSYKSKGEKYLEVKSEKKYITKILNSIEDIHNITWLKNQEENNLFKFYVLTYILLPFEFRGDFLGFVKKHYYDIKNVEFLDENNDRLTPEQLEKMKNDSFFNKIRLFEKNSKKYDILKESILTSERIGKYFSLLNTGAKYFEYGGEENRGIFNKNIIIPIFKYYQIVLKLYNDVELAMLLTLSESDEKDINKIKELVTLKEKVSPKKIDYEKKYKFSVLLDCFNRIINLGKKDFLASEEVKEVAKTFTNLAYLRNKICHLNYSKFIDDLLTIDTNKSTTDSEGKLLINDRIRKLIKFIRENNQKMNISIDYNYINDYYMKKEKFIFGQRKQAKTIIDSGKKANKRNKAEELLKMYRVKKENINLIYELSKKLNELTKSELFLLDKKLLKDIDFTDVKIKNKSFFELKNDVKEVANIKQALQKHSSELIGIYKKEVIMAIKRSIVSKLIYDEEKVLSIIIYDKTNKKYEDFLLEIRRERDINKFQFLIDEKKEKLGYEKIIETKEKKKVVVKIQNNSELVSEPRIIKNKDKKKAKTPEEISKLGILDLTNHYCFNLKITL

SEQ ID NO: 20 - protein, 897 aa, Artificial Sequence
  chemically synthesized
MENKGNNKKIDFDENYNILVAQIKEYFTKEIENYNNRIDNIIDKKELLKYSEKKEESEKNKKLEELNKLKSQKLKILTDEEIKADVIKIIKIFSDLRHSLMHYEYKYFENLFENKKNEELAELLNLNLFKNLTLLRQMKIENKTNYLEGREEFNIIGKNIKAKEVLGHYNLLAEQKNGFNNFINSFFVQDGTENLEFKKLIDEHFVNAKKRLERNIKKSKKLEKELEKMEQHYQRLNCAYVWDIHTSTTYKKLYNKRKSLIEEYNKQINEIKDKEVITAINVELLRIKKEMEEITKSNSLFRLKYKMQIAYAFLEIEFGGNIAKFKDEFDCSKMEEVQKYLKKGVKYLKYYKDKEAQKNYEFPFEEIFENKDTHNEEWLENTSENNLFKFYILTYLLLPMEFKGDFLGVVKKHYYDIKNVDFTDESEKELSQVQLDKMIGDSFFHKIRLFEKNTKRYEIIKYSILTSDEIKRYFRLLELDVPYFEYEKGTDEIGIFNKNIILTIFKYYQIIFRLYNDLEIHGLFNISSDLDKILRDLKSYGNKNINFREFLYVIKQNNNSSTEEEYRKIWENLEAKYLRLHLLTPEKEEIKTKTKEELEKLNEISNLRNGICHLNYKEIIEEILKTEISEKNKEATLNEKIRKVINFIKENELDKVELGFNFINDFFMKKEQFMFGQIKQVKEGNSDSITTERERKEKNNKKLKETYELNCDNLSEFYETSNNLRERANSSSLLEDSAFLKKIGLYKVKNNKVNSKVKDEEKRIENIKRKLLKDSSDIMGMYKAEVVKKLKEKLILIFKHDEEKRIYVTVYDTSKAVPENISKEILVKRNNSKEEYFFEDNNKKYVTEYYTLEITETNELKVIPAKKLEGKEFKTEKNKENKLMLNNHYCFNVKIIY

SEQ ID NO: 21 - protein, 1285 aa, Artificial Sequence
  chemically synthesized
MKLTRRRISGNSVDQKITAAFYRDMSQGLLYYDSEDNDCTDKVIESMDFERSWRGRILKNGEDDKNPFYMFVKGLVGSNDKIVCEPIDVDSDPDNLDILINKNLTGFGRNLKAPDSNDTLENLIRKIQAGIPEEEVLPELKKIKEMIQKDIVNRKEQLLKSIKNNRIPFSLEGSKLVPSTKKMKWLFKLIDVPNKTFNEKMLEKYWEIYDYDKLKANITNRLDKTDKKARSISRAVSEELREYHKNLRTNYNRFVSGDRPAAGLDNGGSAKYNPDKEEFLLFLKEVEQYFKKYFPVKSKHSNKSKDKSLVDKYKNYCSYKVVKKEVNRSIINQLVAGLIQQGKLLYYFYYNDTWQEDFLNSYGLSYIQVEEAFKKSVMTSLSWGINRLTSFFIDDSNTVKFDDITTKKAKEAIESNYFNKLRTCSRMQDHFKEKLAFFYPVYVKDKKDRPDDDIENLIVLVKNAIESVSYLRNRTFHFKESSLLELLKELDDKNSGQNKIDYSVAAEFIKRDIENLYDVFREQIRSLGIAEYYKADMISDCFKTCGLEFALYSPKNSLMPAFKNVYKRGANLNKAYIRDKGPKETGDQGQNSYKALEEYRELTWYIEVKNNDQSYNAYKNLLQLIYYHAFLPEVRENEALITDFINRTKEWNRKETEERLNTKNNKKHKNFDENDDITVNTYRYESIPDYQGESLDDYLKVLQRKQMARAKEVNEKEEGNNNYIQFIRDVVVWAFGAYLENKLKNYKNELQPPLSKENIGLNDTLKELFPEEKVKSPFNIKCRFSISTFIDNKGKSTDNTSAEAVKTDGKEDEKDKKNIKRKDLLCFYLFLRLLDENEICKLQHQFIKYRCSLKERRFPGNRTKLEKETELLAELEELMELVRFTMPSIPEISAKAESGYDTMIKKYFKDFIEKKVFKNPKTSNLYYHSDSKTPVTRKYMALLMRSAPLHLYKDIFKGYYLITKKECLEYIKLSNIIKDYQNSLNELHEQLERIKLKSEKQNGKDSLYLDKKDFYKVKEYVENLEQVARYKHLQHKINFESLYRIFRIHVDIAARMVGYTQDWERDMHFLFKALVYNGVLEERRFEAIFNNNDDNNDGRIVKKIQNNLNNKNRELVSMLCWNKKLNKNEFGAIIWKRNPIAHLNHFTQTEQNSKSSLESLINSLRILLAYDRKRQNAVTKTINDLLLNDYHIRIKWEGRVDEGQIYFNIKEKEDIENEPIIHLKHLHKKDCYIYKNSYMFDKQKEWICNGIKEEVYDKSILKCIGNLFKFDYEDKNKSSANPKHT

SEQ ID NO: 22 - protein, 1051 aa, Artificial Sequence
  chemically synthesized
MKITKMRVDGRTIVMERTSKEGQLGYEGIDGNKTTEIIFDKKKESFYKSILNKTVRKPDEKEKNRRKQAINKAINKEITELMLAVLHQEVPSQKLHNLKSLNTESLTKLFKPKFQNMISYPPSKGAEHVQFCLTDIAVPAIRDLDEIKPDWGIFFEKLKPYTDWAESYIHYKQTTIQKSIEQNKIQSPDSPRKLVLQKYVTAFLNGEPLGLDLVAKKYKLADLAESFKLVDLNEDKSANYKIKACLQQHQRNILDELKEDPELNQYGIEVKKYIQRYFPIKRAPNRSKHARADFLKKELIESTVEQQFKNAVYHYVLEQGKMEAYELTDPKTKDLQDIRSGEAFSFKFINACAFASNNLKMILNPECEKDILGKGNFKKNLPNSTTRSDVVKKMIPFFSDELQNVNFDEAIWAIRGSIQQIRNEVYHCKKHSWKSILKIKGFEFEPNNMKYADSDMQKLMDKDIAKIPEFIEEKLKSSGVVRFYRHDELQSIWEMKQGFSLLTTNAPFVPSFKRVYAKGHDYQTSKNRYYNLDLTTFDILEYGEEDFRARYFLTKLVYYQQFMPWFTADNNAFRDAANFVLRLNKNRQQDAKAFINIREVEEGEMPRDYMGYVQGQIAIHEDSIEDTPNHFEKFISQVFIKGFDRHMRSANLKFIKNPRNQGLEQSEIEEMSFDIKVEPSFLKNKDDYIAFWIFCKMLDARHLSELRNEMIKYDGHLTGEQEIIGLALLGVDSRENDWKQFFSSEREYEKIMKGYVVEELYQREPYRQSDGKTPILFRGVEQARKYGTETVIQRLFDANPEFKVSKCNLAEWERQKETIEETIKRRKELHNEWAKNPKKPQNNAFFKEYKECCDAIDAYNWHKNKTTLAYVNELHHLLIEILGRYVGYVAIADRDFQCMANQYFKHSGITERVEYWGDNRLKSIKKLDTFLKKEGLFVSEKNARNHIAHLNYLSLKSECTLLYLSERLREIFKYDRKLKNAVSKSLIDILDRHGMSVVFANLKENKHRLVIKSLEPKKLRHLGGKKIDGGYIETNQVSEEYCGIVKRLLEM

SEQ ID NO: 23 - protein, 1340 aa, Artificial Sequence
  chemically synthesized
MQISKVNHKHVAVGQKDRERITGFIYNDPVGDEKSLEDVVAKRANDTKVLFNVFNTKDLYDSQESDKSEKDKEIISKGAKFVAKSFNSAITILKKQNKIYSTLTSQQVIKELKDKFGGARIYDDDIEEALTETLKKSFRKENVRNSIKVLIENAAGIRSSLSKDEEELIQEYFVKQLVEEYTKTKLQKNVVKSIKNQNMVIQPDSDSQVLSLSESRREKQSSAVSSDTLVNCKEKDVLKAFLTDYAVLDEDERNSLLWKLRNLVNLYFYGSESIRDYSYTKEKSVWKEHDEQKANKTLFIDEICHITKIGKNGKEQKVLDYEENRSRCRKQNINYYRSALNYAKNNTSGIFENEDSNHFWIHLIENEVERLYNGIENGEEFKFETGYISEKVWKAVINHLSIKYIALGKAVYNYAMKELSSPGDIEPGKIDDSYINGITSFDYEIIKAEESLQRDISMNVVFATNYLACATVDTDKDFLLFSKEDIRSCTKKDGNLCKNIMQFWGGYSTWKNFCEEYLKDDKDALELLYSLKSMLYSMRNSSFHFSTENVDNGSWDTELIGKLFEEDCNRAARIEKEKFYNNNLHMFYSSSLLEKVLERLYSSHHERASQVPSFNRVFVRKNFPSSLSEQRITPKFTDSKDEQIWQSAVYYLCKEIYYNDFLQSKEAYKLFREGVKNLDKNDINNQKAADSFKQAVVYYGKAIGNATLSQVCQAIMTEYNRQNNDGLKKKSAYAEKQNSNKYKHYPLFLKQVLQSAFWEYLDENKEIYGFISAQIHKSNVEIKAEDFIANYSSQQYKKLVDKVKKTPELQKWYTLGRLINPRQANQFLGSIRNYVQFVKDIQRRAKENGNPIRNYYEVLESDSIIKILEMCTKLNGTTSNDIHDYFRDEDEYAEYISQFVNFGDVHSGAALNAFCNSESEGKKNGIYYDGINPIVNRNWVLCKLYGSPDLISKIISRVNENMIHDFHKQEDLIREYQIKGICSNKKEQQDLRTFQVLKNRVELRDIVEYSEIINELYGQLIKWCYLRERDLMYFQLGFHYLCLNNASSKEADYIKINVDDRNISGAILYQIAAMYINGLPVYYKKDDMYVALKSGKKASDELNSNEQTSKKINYFLKYGNNILGDKKDQLYLAGLELFENVAEHENIIIFRNEIDHFHYFYDRDRSMLDLYSEVFDRFFTYDMKLRKNVVNMLYNILLDHNIVSSFVFETGEKKVGRGDSEVIKPSAKIRLRANNGVSSDVFTYKVGSKDELKIATLPAKNEEFLLNVARLIYYPDMEAVSENMVREGVVKVEKSNDKKGKISRGSNTRSSNQSKYNNKSKNRMNYSMGSIFEKMDLKFD

SEQ ID NO: 24 - protein, 1437 aa, Artificial Sequence
  chemically synthesized
MKISKVREENRGAKLTVNAKTAVVSENRSQEGILYNDPSRYGKSRKNDEDRDRYIESRLKSSGKLYRIFNEDKNKRETDELQWFLSEIVKKINRRNGLVLSDMLSVDDRAFEKAFEKYAELSYTNRRNKVSGSPAFETCGVDAATAERLKGIISETNFINRIKNNIDNKVSEDIIDRIIAKYLKKSLCRERVKRGLKKLLMNAFDLPYSDPDIDVQRDFIDYVLEDFYHVRAKSQVSRSIKNMNMPVQPEGDGKFAITVSKGGTESGNKRSAEKEAFKKFLSDYASLDERVRDDMLRRMRRLVVLYFYGSDDSKLSDVNEKFDVWEDHAARRVDNREFIKLPLENKLANGKTDKDAERIRKNTVKELYRNQNIGCYRQAVKAVEEDNNGRYFDDKMLNMFFIHRIEYGVEKIYANLKQVTEFKARTGYLSEKIWKDLINYISIKYIAMGKAVYNYAMDELNASDKKEIELGKISEEYLSGISSFDYELIKAEEMLQRETAVYVAFAARHLSSQTVELDSENSDFLLLKPKGTMDKNDKNKLASNNILNFLKDKETLRDTILQYFGGHSLWTDFPFDKYLAGGKDDVDFLTDLKDVIYSMRNDSFHYATENHNNGKWNKELISAMFEHETERMTVVMKDKFYSNNLPMFYKNDDLKKLLIDLYKDNVERASQVPSFNKVFVRKNFPALVRDKDNLGIELDLKADADKGENELKFYNALYYMFKEIYYNAFLNDKNVRERFITKATKVADNYDRNKERNLKDRIKSAGSDEKKKLREQLQNYIAENDFGQRIKNIVQVNPDYTLAQICQLIMTEYNQQNNGCMQKKSAARKDINKDSYQHYKMLLLVNLRKAFLEFIKENYAFVLKPYKHDLCDKADFVPDFAKYVKPYAGLISRVAGSSELQKWYIVSRFLSPAQANHMLGFLHSYKQYVWDIYRRASETGTEINHSIAEDKIAGVDITDVDAVIDLSVKLCGTISSEISDYFKDDEVYAEYISSYLDFEYDGGNYKDSLNRFCNSDAVNDQKVALYYDGEHPKLNRNIILSKLYGERRFLEKITDRVSRSDIVEYYKLKKETSQYQTKGIFDSEDEQKNIKKFQEMKNIVEFRDLMDYSEIADELQGQLINWIYLRERDLMNFQLGYHYACLNNDSNKQATYVTLDYQGKKNRKINGAILYQICAMYINGLPLYYVDKDSSEWTVSDGKESTGAKIGEFYRYAKSFENTSDCYASGLEIFENISEHDNITELRNYIEHFRYYSSFDRSFLGIYSEVFDRFFTYDLKYRKNVPTILYNILLQHFVNVRFEFVSGKKMIGIDKKDRKIAKEKECARITIREKNGVYSEQFTYKLKNGTVYVDARDKRYLQSIIRLLFYPEKVNMDEMIEVKEKKKPSDNNTGKGYSKRDRQQDRKEYDKYKEKKKKEGNFLSGMGGNINWDEINAQLKN

SEQ ID NO: 25 - protein, 1159 aa, Artificial Sequence
  chemically synthesized
MKVTKVGGISHKKYTSEGRLVKSESEENRTDERLSALLNMRLDMYIKNPSSTETKENQKRIGKLKKFFSNKMVYLKDNTLSLKNGKKENIDREYSETDILESDVRDKKNFAVLKKIYLNENVNSEELEVFRNDIKKKLNKINSLKYSFEKNKANYQKINENNIEKVEGKSKRNIIYDYYRESAKRDAYVSNVKEAFDKLYKEEDIAKLVLEIENLTKLEKYKIREFYHEIIGRKNDKENFAKIIYEEIQNVNNMKELIEKVPDMSELKKSQVFYKYYLDKEELNDKNIKYAFCHFVEIEMSQLLKNYVYKRLSNISNDKIKRIFEYQNLKKLIENKLLNKLDTYVRNCGKYNYYLQDGEIATSDFIARNRQNEAFLRNIIGVSSVAYFSLRNILETENENDITGRMRGKTVKNNKGEEKYVSGEVDKIYNENKKNEVKENLKMFYSYDFNMDNKNEIEDFFANIDEAISSIRHGIVHFNLELEGKDIFAFKNIAPSEISKKMFQNEINEKKLKLKIFRQLNSANVFRYLEKYKILNYLKRTRFEFVNKNIPFVPSFTKLYSRIDDLKNSLGIYWKTPKTNDDNKTKEIIDAQIYLLKNIYYGEFLNYFMSNNGNFFEISKEIIELNKNDKRNLKTGFYKLQKFEDIQEKIPKEYLANIQSLYMINAGNQDEEEKDTYIDFIQKIFLKGFMTYLANNGRLSLIYIGSDEETNTSLAEKKQEFDKFLKKYEQNNNIKIPYEINEFLREIKLGNILKYTERLNMFYLILKLLNHKELTNLKGSLEKYQSANKEEAFSDQLELINLLNLDNNRVTEDFELEADEIGKFLDFNGNKVKDNKELKKFDTNKIYFDGENIIKHRAFYNIKKYGMLNLLEKIADKAGYKISIEELKKYSNKKNEIEKNHKMQENLHRKYARPRKDEKFTDEDYESYKQAIENIEEYTHLKNKVEFNELNLLQGLLLRILHRLVGYTSIWERDLRFRLKGEFPENQYIEEIFNFENKKNVKYKGGQIVEKYIKFYKELHQNDEVKINKYSSANIKVLKQEKKDLYIRNYIAHFNYIPHAEISLLEVLENLRKLLSYDRKLKNAVMKSVVDILKEYGFVATFKIGADKKIGIQTLESEKIVHLKNLKKKKLMTDRNSEELCKLVKIMFEYKMEEKKSEN

SEQ ID NO: 26 - protein, 1120 aa, Artificial Sequence
  chemically synthesized
MWISIKTLIHHLGVLFFCDYMYNRREKKIIEVKTMRITKVEVDRKKVLISRDKNGGKLVYENEMQDNTEQIMHHKKSSFYKSVVNKTICRPEQKQMKKLVHGLLQENSQEKIKVSDVTKLNISNFLNHRFKKSLYYFPENSPDKSEEYRIEINLSQLLEDSLKKQQGTFICWESFSKDMELYINWAENYISSKTKLIKKSIRNNRIQSTESRSGQLMDRYMKDILNKNKPFDIQSVSEKYQLEKLTSALKATFKEAKKNDKEINYKLKSTLQNHERQIIEELKENSELNQFNIEIRKHLETYFPIKKTNRKVGDIRNLEIGEIQKIVNHRLKNKIVQRILQEGKLASYEIESTVNSNSLQKIKIEEAFALKFINACLFASNNLRNMVYPVCKKDILMIGEFKNSFKEIKHKKFIRQWSQFFSQEITVDDIELASWGLRGAIAPIRNEIIHLKKHSWKKFFNNPTFKVKKSKIINGKTKDVTSEFLYKETLFKDYFYSELDSVPELIINKMESSKILDYYSSDQLNQVFTIPNFELSLLTSAVPFAPSFKRVYLKGFDYQNQDEAQPDYNLKLNIYNEKAFNSEAFQAQYSLFKMVYYQVFLPQFTTNNDLFKSSVDFILTLNKERKGYAKAFQDIRKMNKDEKPSEYMSYIQSQLMLYQKKQEEKEKINHFEKFINQVFIKGFNSFIEKNRLTYICHPTKNTVPENDNIEIPFHTDMDDSNIAFWLMCKLLDAKQLSELRNEMIKFSCSLQSTEEISTFTKAREVIGLALLNGEKGCNDWKELFDDKEAWKKNMSLYVSEELLQSLPYTQEDGQTPVINRSIDLVKKYGTETILEKLFSSSDDYKVSAKDIAKLHEYDVTEKIAQQESLHKQWIEKPGLARDSAWTKKYQNVINDISNYQWAKTKVELTQVRHLHQLTIDLLSRLAGYMSIADRDFQFSSNYILERENSEYRVTSWILLSENKNKNKYNDYELYNLKNASIKVSSKNDPQLKVDLKQLRLTLEYLELFDNRLKEKRNNISHFNYLNGQLGNSILELFDDARDVLSYDRKLKNAVSKSLKEILSSHGMEVTFKPLYQTNHHLKIDKLQPKKIHHLGEKSTVSSNQVSNEYCQLVRTLLTMK

SEQ ID NO: 27 - protein, 1389 aa, Artificial Sequence
  chemically synthesized
MGNLFGHKRWYEVRDKKDFKIKRKVKVKRNYDGNKYILNINENNNKEKIDNNKFIRKYINYKKNDNILKEFTRKFHAGNILFKLKGKEGIIRIENNDDFLETEEVVLYIEAYGKSEKLKALGITKKKIIDEAIRQGITKDDKKIEIKRQENEEEIEIDIRDEYTNKTLNDCSIILRIIENDELETKKSIYEIFKNINMSLYKIIEKIIENETEKVFENRYYEEHLREKLLKDDKIDVILTNFMEIREKIKSNLEILGFVKFYLNVGGDKKKSKNKKMLVEKILNINVDLTVEDIADFVIKELEFWNITKRIEKVKKVNNEFLEKRRNRTYIKSYVLLDKHEKFKIERENKKDKIVKFFVENIKNNSIKEKIEKILAEFKIDELIKKLEKELKKGNCDTEIFGIFKKHYKVNFDSKKFSKKSDEEKELYKIIYRYLKGRIEKILVNEQKVRLKKMEKIEIEKILNESILSEKILKRVKQYTLEHIMYLGKLRHNDIDMTTVNTDDFSRLHAKEELDLELITFFASTNMELNKIFSRENINNDENIDFFGGDREKNYVLDKKILNSKIKIIRDLDFIDNKNNITNNFIRKFTKIGTNERNRILHAISKERDLQGTQDDYNKVINIIQNLKISDEEVSKALNLDVVFKDKKNIITKINDIKISEENNNDIKYLPSFSKVLPEILNLYRNNPKNEPFDTIETEKIVLNALIYVNKELYKKLILEDDLEENESKNIFLQELKKTLGNIDEIDENIIENYYKNAQISASKGNNKAIKKYQKKVIECYIGYLRKNYEELFDFSDFKMNIQEIKKQIKDINDNKTYERITVKTSDKTIVINDDFEYIISIFALLNSNAVINKIRNRFFATSVWLNTSEYQNIIDILDEIMQLNTLRNECITENWNLNLEEFIQKMKEIEKDFDDFKIQTKKEIFNNYYEDIKNNILTEFKDDINGCDVLEKKLEKIVIFDDETKFEIDKKSNILQDEQRKLSNINKKDLKKKVDQYIKDKDQEIKSKILCRIIFNSDFLKKYKKEIDNLIEDMESENENKFQEIYYPKERKNELYIYKKNLFLNIGNPNFDKIYGLISNDIKMADAKFLFNIDGKNIRKNKISEIDAILKNLNDKLNGYSKEYKEKYIKKLKENDDFFAKNIQNKNYKSFEKDYNRVSEYKKIRDLVEFNYLNKIESYLIDINWKLAIQMARFERDMHYIVNGLRELGIIKLSGYNTGISRAYPKRNGSDGFYTTTAYYKFFDEESYKKFEKICYGFGIDLSENSEINKPENESIRNYISHFYIVRNPFADYSIAEQIDRVSNLLSYSTRYNNSTYASVFEVFKKDVNLDYDELKKKFKLIGNNDILERLMKPKKVSVLELESYNSDYIKNLIIELLTKIENTNDTL

SEQ ID NO: 28 - protein, 1385 aa, Artificial Sequence
  chemically synthesized
MGNLFGHKRWYEVRDKKDFKIKRKVKVKRNYDGNKYILNINENNNKEKIDNNKFIGEFVNYKKNNNVLKEFKRKFHAGNILFKLKGKEEIIRIENNDDFLETEEVVLYIEVYGKSEKLKALEITKKKIIDEAIRQGITKDDKKIEIKRQENEEEIEIDIRDEYTNKTLNDCSIILRIIENDELETKKSIYEIFKNINMSLYKIIEKIIENETEKVFENRYYEEHLREKLLKDNKIDVILTNFMEIREKIKSNLEIMGFVKFYLNVSGDKKKSENKKMFVEKILNTNVDLTVEDIVDFIVKELKFWNITKRIEKVKKFNNEFLENRRNRTYIKSYVLLDKHEKFKIERENKKDKIVKFFVENIKNNSIKEKIEKILAEFKINELIKKLEKELKKGNCDTEIFGIFKKHYKVNFDSKKFSNKSDEEKELYKIIYRYLKGRIEKILVNEQKVRLKKMEKIEIEKILNESILSEKILKRVKQYTLEHIMYLGKLRHNDIVKMTVNTDDFSRLHAKEELDLELITFFASTNMELNKIFNGKEKVTDFFGFNLNGQKITLKEKVPSFKLNILKKLNFINNENNIDEKLSHFYSFQKEGYLLRNKILHNSYGNIQETKNLKGEYENVEKLIKELKVSDEEISKSLSLDVIFEGKVDIINKINSLKIGEYKDKKYLPSFSKIVLEITRKFREINKDKLFDIESEKIILNAVKYVNKILYEKITSNEENEFLKTLPDKLVKKSNNKKENKNLLSIEEYYKNAQVSSSKGDKKAIKKYQNKVTNAYLEYLENTFTEIIDFSKFNLNYDEIKTKIEERKDNKSKIIIDSISTNINITNDIEYIISIFALLNSNTYINKIRNRFFATSVWLEKQNGTKEYDYENIISILDEVLLINLLRENNITDILDLKNAIIDAKIVENDETYIKNYIFESNEEKLKKRLFCEELVDKEDIRKIFEDENFKFKSFIKKNEIGNFKINFGILSNLECNSEVEAKKIIGKNSKKLESFIQNIIDEYKSNIRTLFSSEFLEKYKEEIDNLVEDTESENKNKFEKIYYPKEHKNELYIYKKNLFLNIGNPNFDKIYGLISKDIKNVDTKILFDDDIKKNKISEIDAILKNLNDKLNGYSNDYKAKYVNKLKENDDFFAKNIQNENYSSFGEFEKDYNKVSEYKKIRDLVEFNYLNKIESYLIDINWKLAIQMARFERDMHYIVNGLRELGIIKLSGYNTGISRAYPKRNGSDGFYTTTAYYKFFDEESYKKFEKICYGFGIDLSENSEINKPENESIRNYISHFYIVRNPFADYSIAEQIDRVSNLLSYSTRYNNSTYASVFEVFKKDVNLDYDELKKKFRLIGNNDILERLMKPKKVSVLELESYNSDYIKNLIIELLTKIENTNDTL

SEQ ID NO: 29 - protein, 1152 aa, Artificial Sequence
  chemically synthesized
MKVTKVDGISHKKYIEEGKLVKSTSEENRTSERLSELLSIRLDIYIKNPDNASEEENRIRRENLKKFFSNKVLHLKDSVLYLKNRKEKNAVQDKNYSEEDISEYDLKNKNSFSVLKKILLNEDVNSEELEIFRKDVEAKLNKINSLKYSFEENKANYQKINENNVEKVGGKSKRNIIYDYYRESAKRNDYINNVQEAFDKLYKKEDIEKLFFLIENSKKHEKYKIREYYHKIIGRKNDKENFAKIIYEEIQNVNNIKELIEKIPDMSELKKSQVFYKYYLDKEELNDKNIKYAFCHFVEIEMSQLLKNYVYKRLSNISNDKIKRIFEYQNLKKLIENKLLNKLDTYVRNCGKYNYYLQVGEIATSDFIARNRQNEAFLRNIIGVSSVAYFSLRNILETENENDITGRMRGKTVKNNKGEEKYVSGEVDKIYNENKQNEVKENLKMFYSYDFNMDNKNEIEDFFANIDEAISSIRHGIVHFNLELEGKDIFAFKNIAPSEISKKMFQNEINEKKLKLKIFKQLNSANVFNYYEKDVIIKYLKNTKFNFVNKNIPFVPSFTKLYNKIEDLRNTLKFFWSVPKDKEEKDAQIYLLKNIYYGEFLNKFVKNSKVFFKITNEVIKINKQRNQKTGHYKYQKFENIEKTVPVEYLAIIQSREMINNQDKEEKNTYIDFIQQIFLKGFIDYLNKNNLKYIESNNNNDNNDIFSKIKIKKDNKEKYDKILKNYEKHNRNKEIPHEINEFVREIKLGKILKYTENLNMFYLILKLLNHKELTNLKGSLEKYQSANKEETFSDELELINLLNLDNNRVTEDFELEANEIGKFLDFNENKIKDRKELKKFDTNKIYFDGENIIKHRAFYNIKKYGMLNLLEKIADKAKYKISLKELKEYSNKKNEIEKNYTMQQNLHRKYARPKKDEKFNDEDYKEYEKAIGNIQKYTHLKNKVEFNELNLLQGLLLKILHRLVGYTSIWERDLRFRLKGEFPENHYIEEIFNFDNSKNVKYKSGQIVEKYINFYKELYKDNVEKRSIYSDKKVKKLKQEKKDLYIRNYIAHFNYIPHAEISLLEVLENLRKLLSYDRKLKNAIMKSIVDILKEYGFVATFKIGADKKIEIQTLESEKIVHLKNLKKKKLMTDRNSEELCELVKVMFEYKALE

SEQ ID NO: 30 - protein, 1152 aa, Artificial Sequence; identical to SEQ ID NO: 29
  chemically synthesized

SEQ ID NO: 31 - protein, 970 aa, Artificial Sequence
  chemically synthesized
MLALLHQEVPSQKLHNLKSLNTESLTKLFKPKFQNMISYPPSKGAEHVQFCLTDIAVPAIRDLDEIKPDWGIFFEKLKPYTDWAESYIHYKQTTIQKSIEQNKIQSPDSPRKLVLQKYVTAFLNGEPLGLDLVAKKYKLADLAESFKVVDLNEDKSANYKIKACLQQHQRNILDELKEDPELNQYGIEVKKYIQRYFPIKRAPNRSKHARADFLKKELIESTVEQQFKNAVYHYVLEQGKMEAYELTDPKTKDLQDIRSGEAFSFKFINACAFASNNLKMILNPECEKDILGKGDFKKNLPNSTTQSDVVKKMIPFFSDEIQNVNFDEAIWAIRGSIQQIRNEVYHCKKHSWKSILKIKGFEFEPNNMKYTDSDMQKLMDKDIAKIPDFIEEKLKSSGIIRFYSHDKLQSIWEMKQGFSLLTTNAPFVPSFKRVYAKGHDYQTSKNRYYDLGLTTFDILEYGEEDFRARYFLTKLVYYQQFMPWFTADNNAFRDAANFVLRLNKNRQQDAKAFINIREVEEGEMPRDYMGYVQGQIAIHEDSTEDTPNHFEKFISQVFIKGFDSHMRSADLKFIKNPRNQGLEQSEIEEMSFDIKVEPSFLKNKDDYIAFWTFCKMLDARHLSELRNEMIKYDGHLTGEQEIIGLALLGVDSRENDWKQFFSSEREYEKIMKGYVGEELYQREPYRQSDGKTPILFRGVEQARKYGTETVIQRLFDASPEFKVSKCNITEWERQKETIEETIERRKELHNEWEKNPKKPQNNAFFKEYKECCDAIDAYNWHKNKTTLVYVNELHHLLIEILGRYVGYVAIADRDFQCMANQYFKHSGITERVEYWGDNRLKSIKKLDTFLKKEGLFVSEKNARNHIAHLNYLSLKSECTLLYLSERLREIFKYDRKLKNAVSKSLIDILDRHGMSVVFANLKENKHRLVIKSLEPKKLRHLGEKKIDNGYIETNQVSEEYCGIVKRLLEI

SEQ ID NO: 32 - protein, 1124 aa, Artificial Sequence
  chemically synthesized
MEDDKKTTGSISYELKDKHFWAAFLNLARHNVYITINHINKLLEIREIDNDEKVLDIKTLWQKGNKDLNQKARLRELMTKHFPFLETAIYTKNKEDKKEVKQEKQAEAQSLESLKDCLFLFLDKLQEARNYYSHYKYSEFSKEPEFEEGLLEKMYNIFGNNIQLVINDYQHNKDINPDEDFKHLDRKGQFKYSFADNEGNITESGLLFFVSLFLEKKDAIWMQQKLNGFKDNLENKKKMTHEVFCRSRILMPKLRLESTQTQDWILLDMLNELIRCPKSLYERLQGDDREKFKVPFDPADEDYNAEQEPFKNTLIRHQDRFPYFVLRYFDYNEIFKNLRFQIDLGTYHFSIYKKLIGGQKEDRHLTHKLYGFERIQEFAKQNRPDEWKAIVKDLDTYETSNKRYISETTPHYHLENQKIGIRFRNGNKEIWPSLKTNDENNEKSKYKLDKQYQAEAFLSVHELLPMMFYYLLLKKEKPNNDEINASIVEGFIKREIRNIFKLYDAFANGEINNIDDLEKYCADKGIPKRHLPKQMVAILYDEHKDMVKEAKRKQKEMVKDTKKLLATLEKQTQKEKEDDGRNVKLLKSGEIARWLVNDMMRFQPVQKDNEGKPLNNSKANSTEYQMLQRSLALYNNEEKPTRYFRQVNLIESNNPHPFLKWTKWEECNNILTFYYSYLTKKIEFLNKLKPEDWKKNQYFLKLKEPKTNRETLVQGWKNGFNLPRGIFTEPIREWFKRHQNNSKEYEKVEALDRVGLVTKVIPLFFKEEYFKDKEENFKEDTQKEINDCVQPFYNFPYNVGNIHKPKEKDFLHREERIELWDKKKDKFKGYKEKIKSKKLTEKDKEEFRSYLEFQSWNKFERELRLVRNQDIVTWLLCKELIDKLKIDELNIEELKKLRLNNIDTDTAKKEKNNILNRVMPMELPVTVYEIDDSHKIVKDKPLHTIYIKEAETKLLKQGNFKALVKDRRLNGLFSFVKTNSEAESKRNPISKLRVEYELGEYQEARIEIIQDMLALEEKLINKYKDLPTNKFSEMLNSWLEGKDEADKARFQNDVDFLIAVRNAFSHNQYPMHNKIEFANIKPFSLYTANNSEEKGLGIANQLKDKTKETTDKIKKIEKPIETKE

SEQ ID NO: 33 - protein, 1127 aa, Artificial Sequence
  chemically synthesized
MQKQDKLFVDRKKNAIFAFPKYITIMENKEKPEPIYYELTDKHFWAAFLNLARHNVYTTINHINRRLEIAELKDDGYMMGIKGSWNEQAKKLDKKVRLRDLIMKHFPFLEAAAYEMTNSKSPNNKEQREKEQSEALSLNNLKNVLFIFLEKLQVLRNYYSHYKYSEESPKPIFETSLLKNMYKVFDANVRLVKRDYMHHENIDMQRDFTHLNRKKQVGRTKNIIDSPNFHYHFADKEGNMTIAGLLFFVSLFLDKKDAIWMQKKLKGFKDGRNLREQMTNEVFCRSRISLPKLKLENVQTKDWMQLDMLNELVRCPKSLYERLREKDRESFKVPFDIFSDDYNAEEEPFKNTLVRHQDRFPYFVLRYFDLNEIFEQLRFQIDLGTYHFSIYNKRIGDEDEVRHLTHHLYGFARIQDFAPQNQPEEWRKLVKDLDHFETSQEPYISKTAPHYHLENEKIGIKFCSAHNNLFPSLQTDKTCNGRSKFNLGTQFTAEAFLSVHELLPMMFYYLLLTKDYSRKESADKVEGIIRKEISNIYAIYDAFANNEINSIADLTRRLQNTNILQGHLPKQMISILKGRQKDMGKEAERKIGEMIDDTQRRLDLLCKQTNQKIRIGKRNAGLLKSGKIADWLVNDMMRFQPVQKDQNNIPINNSKANSTEYRMLQRALALFGSENFRLKAYFNQMNLVGNDNPHPFLAETQWEHQTNILSFYRNYLEARKKYLKGLKPQNWKQYQHFLILKVQKTNRNTLVTGWKNSFNLPRGIFTQPIREWFEKHNNSKRIYDQILSFDRVGFVAKAIPLYFAEEYKDNVQPFYDYPFNIGNRLKPKKRQFLDKKERVELWQKNKELFKNYPSEKKKTDLAYLDFLSWKKFERELRLIKNQDIVTWLMFKELFNMATVEGLKIGEIHLRDIDTNTANEESNNILNRIMPMKLPVKTYETDNKGNILKERPLATFYIEETETKVLKQGNFKALVKDRRLNGLFSFAETTDLNLEEHPISKLSVDLELIKYQTTRISIFEMTLGLEKKLIDKYSTLPTDSFRNMLERWLQCKANRPELKNYVNSLIAVRNAFSHNQYPMYDATLFAEVKKFTLFPSVDTKKIELNIAPQLLEIVGKAIKEIEKSENKN

SEQ ID NO: 34 - protein, 1119 aa, Artificial Sequence
  chemically synthesized
MTEQNEKPYNGTYYTLEDKHFWAAFLNLARHNAYITLAHIDRQLAYSKADITNDEDILFFKGQWKNLDNDLERKARLRSLILKHFSFLEGAAYGKKLFESQSSGNKSSKKKELSKKEKEELQANALSLDNLKSILFDFLQKLKDFRNYYSHYRHPESSELPLFDGNMLQRLYNVFDVSVQRVKRDHEHNDKVDPHRHFNHLVRKGKKDKYGNNDNPFFKHHFVDREGTVTEAGLLFFVSLFLEKRDAIWMQKKIRGFKGGTEAYQQMTNEVFCRSRISLPKLKLESLRTDDWMLLDMLNELVRCPKSLYDRLREEDRARFRVPVDILSDEDDTDGTEEDPFKNTLVRHQDRFPYFALRYFDLKKVFTSLRFHIDLGTYHFAIYKKNIGEQPEDRHLTRNLYGFGRIQDFAEEHRPEEWKRLVRDLDYFETGDKPYITQTTPHYHIEKGKIGLRFVPEGQHLWPSPEVGATRTGRSKYAQDKRLTAEAFLSVHELMPMMFYYFLLREKYSEEVSAEKVQGRIKRVIEDVYAVYDAFARDEINTRDELDACLADKGIRRGHLPRQMIAILSQEHKDMEEKVRKKLQEMIADTDHRLDMLDRQTDRKIRIGRKNAGLPKSGVVADWLVRDMMRFQPVAKDTSGKPLNNSKANSTEYRMLQRALALFGGEKERLTPYFRQMNLTGGNNPHPFLHETRWESHTNILSFYRSYLEARKAFLQSIGRSDRVENHRFLLLKEPKTDRQTLVAGWKGEFHLPRGIFTEAVRDCLIEMGYDEVGSYKEVGFMAKAVPLYFERASKDRVQPFYDYPFNVGNSLKPKKGRFLSKEKRAEEWESGKERFRLAKLKKEILEAKEHPYHDFKSWQKFERELRLVKNQDIITWMMCRDLMEENKVEGLDTGTLYLKDIRTDVQEQGSLNVLNRVKPMRLPVVVYRADSRGHVHKEQAPLATVYIEERDTKLLKQGNFKSFVKDRRLNGLFSFVDTGALAMEQYPISKLRVEYELAKYQTARVCAFEQTLELEESLLTRYPHLPDKNFRKMLESWSDPLLDKWPDLHGNVRLLIAVRNAFSHNQYPMYDETLFSSIRKYDPSSPDAIEERMGLNIAHRLSEEVKQAKEMVERIIQA

SEQ ID NO: 35 - protein, 1175 aa, Artificial Sequence
  chemically synthesized
MTEQSERPYNGTYYTLEDKHFWAAFLNLARHNAYITLTHIDRQLAYSKADITNDQDVLSFKALWKNFDNDLERKSRLRSLILKHFSFLEGAAYGKKLFESKSSGNKSSKNKELTKKEKEELQANALSLDNLKSILFDFLQKLKDFRNYYSHYRHSGSSELPLFDGNMLQRLYNVFDVSVQRVKIDHEHNDEVDPHYHFNHLVRKGKKDRYGHNDNPSFKHHFVDGEGMVTEAGLLFFVSLFLEKRDAIWMQKKIRGFKGGTETYQQMTNEVFCRSRISLPKLKLESLRMDDWMLLDMLNELVRCPKPLYDRLREDDRACFRVPVDILPDEDDTDGGGEDPFKNTLVRHQDRFPYFALRYFDLKKVFTSLRFHIDLGTYHFAIYKKMIGEQPEDRHLTRNLYGFGRIQDFAEEHRPEEWKRLVRDLDYFETGDKPYISQTSPHYHIEKGKIGLRFMPEGQHLWPSPEVGTTRTGRSKYAQDKRLTAEAFLSVHELMPMMFYYFLLREKYSEEVSAERVQGRIKRVIEDVYAVYDAFARDEINTRDELDACLADKGIRRGHLPRQMIAILSQEHKDMEEKIRKKLQEMMADTDHRLDMLDRQTDRKIRIGRKNAGLPKSGVIADWLVRDMMRFQPVAKDASGKPLNNSKANSTEYRMLQRALALFGGEKERLTPYFRQMNLTGGNNPHPFLHETRWESHTNILSFYRSYLRARKAFLERIGRSDRVENRPFLLLKEPKTDRQTLVAGWKGEFHLPRGIFTEAVRDCLIEMGHDEVASYKEVGFMAKAVPLYFERACEDRVQPFYDSPFNVGNSLKPKKGRFLSKEERAEEWERGKERFRDLEAWSYSAARRIEDAFAGIEYASPGNKKKIEQLLRDLSLWEAFESKLKVRADRINLAKLKKEILEAQEHPYHDFKSWQKFERELRLVKNQDIITWMMCRDLMEENKVEGLDTGTLYLKDIRPNVQEQGSLNVLNRVKPMRLPVVVYRADSRGHVHKEEAPLATVYIEERDTKLLKQGNFKSFVKDRRLNGLFSFVDTGGLAMEQYPISKLRVEYELAKYQTARVCVFELTLRLEESLLTRYPHLPDESFREMLESWSDPLLAKWPELHGKVRLLIAVRNAFSHNQYPMYDEAVFSSIRKYDPSSPDAIEERMGLNIAHRLSEEVKQAKETVERIIQA

SEQ ID NO: 36 - protein, 1120 aa, Artificial Sequence
  chemically synthesized
MEDDKKTTDSIRYELKDKHFWAAFLNLARHNVYITVNHINKILEEDEINRDGYENTLENSWNEIKDINKKDRLSKLIIKHFPFLEATTYRQNPTDTTKQKEEKQAEAQSLESLKKSFFVFIYKLRDLRNHYSHYKHSKSLERPKFEEDLQNKMYNIFDVSIQFVKEDYKHNTDINPKKDFKHLDRKRKGKFHYSFADNEGNITESGLLFFVSLFLEKKDAIWVQKKLEGFKCSNKSYQKMTNEVFCRSRMLLPKLRLESTQTQDWILLDMLNELIRCPKSLYERLQGVNRKKFYVSFDPADEDYDAEQEPFKNTLVRHQDRFPYFALRYFDYNEVFANLRFQIDLGTYHFSIYKKLIGGQKEDRHLTHKLYGFERIQEFDKQNRPDEWKAIVKDSDTFKKKEEKEEEKPYISETTPHYHLENKKIGIAFKNHNIWPSTQTELTNNKRKKYNLGTSIKAEAFLSVHELLPMMFYYLLLKTENTKNDNKVGGKKETKKQGKHKIEAIIESKIKDIYALYDAFANGEINSEDELKEYLKGKDIKIVHLPKQMIAILKNEHKDMAEKAEAKQEKMKLATENRLKTLDKQLKGKIQNGKRYNSAPKSGEIASWLVNDMMRFQPVQKDENGESLNNSKANSTEYQLLQRTLAFFGSEHERLAPYFKQTKLIESSNPHPFLNDTEWEKCSNILSFYRSYLKARKNFLESLKPEDWEKNQYFLMLKEPKTNRETLVQGWKNGFNLPRGFFTEPIRKWFMEHWKSIKVDDLKRVGLVAKVTPLFFSEKYKDSVQPFYNYPFNVGDVNKPKEEDFLHREERIELWDKKKDKFKGYKAKKKFKEMTDKEKEEHRSYLEFQSWNKFERELRLVRNQDIVTWLLCTELIDKLKIDELNIKELKKLRLKDINTDTAKKEKNNILNRVMPMELPVTVYKVNKGGYIIKNKPLHTIYIKEAETKLLKQGNFKALVKDRRLNGLFSFVKTPSEAESESNPISKLRVEYELGKYQNARLDIIEDMLALEKKLIDKYNSLDTDNFHNMLTGWLELKGEAKKARFQNDVKLLTAVRNAFSHNQYPMYDENLFGNIERFSLSSSNIIESKGLDIAAKLKEEVSKAAKKIQNEEDNKKEKET

SEQ ID NO: 37 - protein, 1132 aa, Artificial Sequence
  chemically synthesized
MEDDKKTKESTNMLDNKHFWAAFLNLARHNVYITVNHINKVLELKNKKDQDIIIDNDQDILAIKTHWEKVNGDLNKTERLRELMTKHFPFLETAIYTKNKEDKEEVKQEKQAKAQSFDSLKHCLFLFLEKLQEARNYYSHYKYSESTKEPMLEKELLKKMYNIFDDNIQLVIKDYQHNKDINPDEDFKHLDRTEEEFNYYFTTNKKGNITASGLLFFVSLFLEKKDAIWMQQKLRGFKDNRESKKKMTHEVFCRSRMLLPKLRLESTQTQDWILLDMLNELIRCPKSLYERLQGEYRKKFNVPFDSADEDYDAEQEPFKNTLVRHQDRFPYFALRYFDYNEIFTNLRFQIDLGTYHFSIYKKLIGGQKEDRHLTHKLYGFERIQEFAKQNRTDEWKAIVKDFDTYETSEEPYISETAPHYHLENQKIGIRFRNDNDEIWPSLKTNGENNEKRKYKLDKQYQAEAFLSVHELLPMMFYYLLLKKEEPNNDKKNASIVEGFIKREIRDIYKLYDAFANGEINNIDDLEKYCEDKGIPKRHLPKQMVAILYDEHKDMAEEAKRKQKEMVKDTKKLLATLEKQTQGEIEDGGRNIRLLKSGEIARWLVNDMMRFQPVQKDNEGNPLNNSKANSTEYQMLQRSLALYNKEEKPTRYFRQVNLINSSNPHPFLKWTKWEECNNILSFYRSYLTKKIEFLNKLKPEDWEKNQYFLKLKEPKTNRETLVQGWKNGFNLPRGIFTEPIREWFKRHQNDSEEYEKVETLDRVGLVTKVIPLFFKKEDSKDKEEYLKKDAQKEINNCVQPFYGFPYNVGNIHKPDEKDFLPSEERKKLWGDKKYKFKGYKAKVKSKKLTDKEKEEYRSYLEFQSWNKFERELRLVRNQDIVTWLLCTELIDKLKVEGLNVEELKKLRLKDIDTDTAKQEKNNILNRVMPMQLPVTVYEIDDSHNIVKDRPLHTVYIEETKTKLLKQGNFKALVKDRRLNGLFSFVDTSSETELKSNPISKSLVEYELGEYQNARIETIKDMLLLEETLIEKYKTLPTDNFSDMLNGWLEGKDEADKARFQNDVKLLVAVRNAFSHNQYPMRNRIAFANINPFSLSSADTSEEKKLDIANQLKDKTHKIIKRIIEIEKPIETKE

SEQ ID NO: 38 - protein, 1126 aa, Artificial Sequence
  chemically synthesized
MEDDKKTTDSIRYELKDKHFWAAFLNLARHNVYITVNHINKILEEGEINRDGYETTLKNTWNEIKDINKKDRLSKLIIKHFPFLEAATYRLNPTDTTKQKEEKQAEAQSLESLRKSFFVFIYKLRDLRNHYSHYKHSKSLERPKFEEGLLEKMYNIFNASIRLVKEDYQYNKDINPDEDFKHLDRTEEEFNYYFTKDNEGNITESGLLFFVSLFLEKKDAIWMQQKLRGFKDNRENKKKMTNEVFCRSRMLLPKLRLQSTQTQDWILLDMLNELIRCPKSLYERLREEDREKFRVPIEIADEDYDAEQEPFKNTLVRHQDRFPYFALRYFDYNEIFTNLRFQIDLGTYHFSIYKKQIGDYKESHHLTHKLYGFERIQEFTKQNRPDEWRKFVKTFNSFETSKEPYIPETTPHYHLENQKIGIRFRNDNDKIWPSLKTNSEKNEKSKYKLDKSFQAEAFLSVHELLPMMFYYLLLKTENTDNDNEIETKKKENKNDKQEKHKIEEIIENKITEIYALYDTFANGEIKSIDELEEYCKGKDIEIGHLPKQMIAILKDEHKVMATEAERKQEEMLVDVQKSLESLDNQINEEIENVERKNSSLKSGKIASWLVNDMMRFQPVQKDNEGKPLNNSKANSTEYQLLQRTLAFFGSEHERLAPYFKQTKLIESSNPHPFLKDTEWEKCNNILSFYRSYLEAKKNFLESLKPEDWEKNQYFLKLKEPKTKPKTLVQGWKNGFNLPRGIFTEPIRKWFMKHRENITVAELKRVGLVAKVIPLFFSEEYKDSVQPFYNYHFNVGNINKPDEKNFLNCEERRELLRKKKDEFKKMTDKEKEENPSYLEFKSWNKFERELRLVRNQDIVTWLLCMELFNKKKIKELNVEKIYLKNINTNTTKKEKNTEEKNGEEKNIKEKNNILNRIMPMRLPIKVYGRENFSKNKKKKIRRNTFFTVYIEEKGTKLLKQGNFKALERDRRLGGLFSFVKTPSKAESKSNTISKLRVEYELGEYQKARIEIIKDMLALEKTLIDKYNSLDTDNFNKMLTDWLELKGEPDKASFQNDVDLLIAVRNAFSHNQYPMRNRIAFANINPFSLSSANTSEEKGLGIANQLKDKTHKTIEKIIEIEKPIETKE

SEQ ID NO: 39 - protein, 1154 aa, Artificial Sequence
  chemically synthesized
MRVSKVKVKDGGKDKMVLVHRKTTGAQLVYSGQPVSNETSNILPEKKRQSFDLSTLNKTIIKFDTAKKQKLNVDQYKIVEKIFKYPKQELPKQIKAEEILPFLNHKFQEPVKYWKNGKEESFNLTLLIVEAVQAQDKRKLQPYYDWKTWYIQTKSDLLKKSIENNRIDLTENLSKRKKALLAWETEFTASGSIDLTHYHKVYMTDVLCKMLQDVKPLTDDKGKINTNAYHRGLKKALQNHQPAIFGTREVPNEANRADNQLSIYHLEVVKYLEHYFPIKTSKRRNTADDIAHYLKAQTLKTTIEKQLVNAIRANIIQQGKTNHHELKADTTSNDLIRIKTNEAFVLNLTGTCAFAANNIRNMVDNEQTNDILGKGDFIKSLLKDNTNSQLYSFFFGEGLSTNKAEKETQLWGIRGAVQQIRNNVNHYKKDALKTVFNISNFENPTITDPKQQTNYADTIYKARFINELEKIPEAFAQQLKTGGAVSYYTIENLKSLLTTFQFSLCRSTIPFAPGFKKVFNGGINYQNAKQDESFYELMLEQYLRKENFAEESYNARYFMLKLIYNNLFLPGFTTDRKAFADSVGFVQMQNKKQAEKVNPRKKEAYAFEAVRPMTAADSIADYMAYVQSELMQEQNKKEEKVAEETRINFEKFVLQVFIKGFDSFLRAKEFDFVQMPQPQLTATASNQQKADKLNQLEASITADCKLTPQYAKADDATHIAFYVFCKLLDAAHLSNLRNELIKFRESVNEFKFHHLLEIIEICLLSADVVPTDYRDLYSSEADCLARLRPFIEQGADITNWSDLFVQSDKHSPVIHANIELSVKYGTTKLLEQIINKDTQFKTTEANFTAWNTAQKSIEQLIKQREDHHEQWVKAKNADDKEKQERKREKSNFAQKFIEKHGDDYLDICDYINTYNWLDNKMHFVHLNRLHGLTIELLGRMAGFVALFDRDFQFFDEQQIADEFKLHGFVNLHSIDKKLNEVPTKKIKEIYDIRNKIIQINGNKINESVRANLIQFISSKRNYYNNAFLHVSNDEIKEKQMYDIRNHIAHFNYLTKDAADFSLIDLINELRELLHYDRKLKNAVSKAFIDLFDKHGMILKLKLNADHKLKVESLEPKKIYHLGSSAKDKPEYQYCTNQVMMAYCNMCRSLLEMKK

SEQ ID NO: 40 - protein, 1151 aa, Artificial Sequence
  chemically synthesized
MEDKPFWAAFFNLARHNVYLTVNHINKLLDLEKLYDEGKHKEIFEREDIFNISDDVMNDANSNGKKRKLDIKKIWDDLDTDLTRKYQLRELILKHFPFIQPAIIGAQTKERTTIDKDKRSTSTSNDSLKQTGEGDINDLLSLSNVKSMFFRLLQILEQLRNYYSHVKHSKSATMPNFDEDLLNWMRYIFIDSVNKVKEDYSSNSVIDPNTSFSHLIYKDEQGKIKPCRYPFTSKDGSINAFGLLFFVSLFLEKQDSIWMQKKIPGFKKASENYMKMTNEVFCRNHILLPKIRLETVYDKDWMLLDMLNEVVRCPLSLYKRLTPAAQNKFKVPEKSSDNANRQEDDNPFSRILVRHQNRFPYFVLRFFDLNEVFTTLRFQINLGCYHFAICKKQIGDKKEVHHLIRTLYGFSRLQNFTQNTRPEEWNTLVKTTEPSSGNDGKTVQGVPLPYISYTIPHYQIENEKIGIKIFDGDTAVDTDIWPSVSTEKQLNKPDKYTLTPGFKADVFLSVHELLPMMFYYQLLLCEGMLKTDAGNAVEKVLIDTRNAIFNLYDAFVQEKINTITDLENYLQDKPILIGHLPKQMIDLLKGHQRDMLKAVEQKKAMLIKDTERRLKLLDKQLKQETDVAAKNTGTLLKNGQIADWLVNDMMRFQPVKRDKEGNPINCSKANSTEYQMLQRAFAFYATDSCRLSRYFTQLHLIHSDNSHLFLSRFEYDKQPNLIAFYAAYLKAKLEFLNELQPQNWASDNYFLLLRAPKNDRQKLAEGWKNGFNLPRGLFTEKIKTWFNEHKTIVDISDCDIFKNRVGQVARLIPVFFDKKFKDHSQPFYRYDFNVGNVSKPTEANYLSKGKREELFKSYQNKFKNNIPAEKTKEYREYKNFSLWKKFERELRLIKNQDILIWLMCKNLFDEKIKPKKDILEPRIAVSYIKLDSLQTNTSTAGSLNALAKVVPMTLAIHIDSPKPKGKAGNNEKENKEFTVYIKEEGTKLLKWGNFKTLLADRRIKGLFSYIEHDDIDLKQHPLTKRRVDLELDLYQTCRIDIFQQTLGLEAQLLDKYSDLNTDNFYQMLIGWRKKEGIPRNIKEDTDFLKDVRNAFSHNQYPDSKKIAFRRIRKFNPKELILEEEEGLGIATQMYKEVEKVVNRIKRIELFD

SEQ ID NO: 41 - protein, 1322 aa, Artificial Sequence
  chemically synthesized
MSKECKKQRQEKKRRLQKANFSISLTGKHVFGAYFNMARTNFVKTINYILPIAGVRGNYSENQINKMLHALFLIQAGRNEELTTEQKQWEKKLRLNPEQQTKFQKLLFKHFPVLGPMMADVADHKAYLNKKKSTVQTEDETFAMLKGVSLADCLDIICLMADTLTECRNFYTHKDPYNKPSQLADQYLHQEMIAKKLDKVVVASRRILKDREGLSVNEVEFLTGIDHLHQEVLKDEFGNAKVKDGKVMKTFVEYDDFYFKISGKRLVNGYTVTTKDDKPVNVNTMLPALSDFGLLYFCVLFLSKPYAKLFIDEVRLFEYSPFDDKENMIMSEMLSIYRIRTPRLHKIDSHDSKATLAMDIFGELRRCPMELYNLLDKNAGQPFFHDEVKHPNSHTPDVSKRLRYDDRFPTLALRYIDETELFKRIRFQLQLGSFRYKFYDKENCIDGRVRVRRIQKEINGYGRMQEVADKRMDKWGDLIQKREERSVKLEHEELYINLDQFLEDTADSTPYVTDRRPAYNIHANRIGLYWEDSQNPKQYKVFDENGMYIPELVVTEDKKAPIKMPAPRCALSVYDLPAMLFYEYLREQQDNEFPSAEQVIIEYEDDYRKFFKAVAEGKLKPFKRPKEFRDFLKKEYPKLRMADIPKKLQLFLCSHGLCYNNKPETVYERLDRLTLQHLEERELHIQNRLEHYQKDRDMIGNKDNQYGKKSFSDVRHGALARYLAQSMMEWQPTKLKDKEKGHDKLTGLNYNVLTAYLATYGHPQVPEEGFTPRTLEQVLINAHLIGGSNPHPFINKVLALGNRNIEELYLHYLEEELKHIRSRIQSLSSNPSDKALSALPFIHHDRMRYHERTSEEMMALAARYTTIQLPDGLFTPYILEILQKHYTENSDLQNALSQDVPVKLNPTCNAAYLITLFYQTVLKDNAQPFYLSDKTYTRNKDGEKAESFSFKRAYELFSVLNNNKKDTFPFEMIPLFLTSDEIQERLSAKLLDGDGNPVPEVGEKGKPATDSQGNTIWKRRIYSEVDDYAEKLTDRDMKISFKGEWEKLPRWKQDKIIKRRDETRRQMRDELLQRMPRYIRDIKDNERTLRRYKTQDMVLFLLAEKMFTNIISEQSSEFNWKQMRLSKVCNEAFLRQTLTFRVPVTVGETTIYVEQENMSLKNYGEFYRFLTDDRLMSLLNNIVETLKPNENGDLVIRHTDLMSELAAYDQYRSTIFMLIQSIENLIITNNAVLDDPDADGFWVREDLPKRNNFASLLELINQLNNVELTDDERKLLVAIRNAFSHNSYNIDFSLIKDVKHLPEVAKGILQHLQSMLGVEITK

SEQ ID NO: 42 - protein, 1095 aa, Artificial Sequence
  chemically synthesized
MEKPLLPNVYTLKHKFFWGAFLNIARHNAFITICHINEQLGLKTPSNDDKIVDVVCETWNNILNNDHDLLKKSQLTELILKHFPFLTAMCYHPPKKEGKKKGHQKEQQKEKESEAQSQAEALNPSKLIEALEILVNQLHSLRNYYSHYKHKKPDAEKDIFKHLYKAFDASLRMVKEDYKAHFTVNLTRDFAHLNRKGKNKQDNPDFNRYRFEKDGFFTESGLLFFTNLFLDKRDAYWMLKKVSGFKASHKQREKMTTEVFCRSRILLPKLRLESRYDHNQMLLDMLSELSRCPKLLYEKLSEENKKHFQVEADGFLDEIEEEQNPFKDTLIRHQDRFPYFALRYLDLNESFKSIRFQVDLGTYHYCIYDKKIGDEQEKRHLTRTLLSFGRLQDFTEINRPQEWKALTKDLDYKETSNQPFISKTTPHYHITDNKIGFRLGTSKELYPSLEIKDGANRIAKYPYNSGFVAHAFISVHELLPLMFYQHLTGKSEDLLKETVRHIQRIYKDFEEERINTIEDLEKANQGRLPLGAFPKQMLGLLQNKQPDLSEKAKIKIEKLIAETKLLSHRLNTKLKSSPKLGKRREKLIKTGVLADWLVKDFMRFQPVAYDAQNQPIKSSKANSTEFWFIRRALALYGGEKNRLEGYFKQTNLIGNTNPHPFLNKFNWKACRNLVDFYQQYLEQREKFLEAIKNQPWEPYQYCLLLKIPKENRKNLVKGWEQGGISLPRGLFTEAIRETLSEDLMLSKPIRKEIKKHGRVGFISRAITLYFKEKYQDKHQSFYNLSYKLEAKAPLLKREEHYEYWQQNKPQSPTESQRLELHTSDRWKDYLLYKRWQHLEKKLRLYRNQDVMLWLMTLELTKNHFKELNLNYHQLKLENLAVNVQEADAKLNPLNQTLPMVLPVKVYPATAFGEVQYHKTPIRTVYIREEHTKALKMGNFKALVKDRRLNGLFSFIKEENDTQKHPISQLRLRRELEIYQSLRVDAFKETLSLEEKLLNKHTSLSSLENEFRALLEEWKKEYAASSMVTDEHIAFIASVRNAFCHNQYPFYKEALHAPIPLFTVAQPTTEEKDGLGIAEALLKVLREYCEIVKSQI

SEQ ID NO: 43 - protein, 1285 aa, Artificial Sequence
  chemically synthesized
MQIGKVQGRTISEFGDPAGGLKRKISTDGKNRKELPAHLSSDPKALIGQWISGIDKIYRKPDSRKSDGKAIHSPTPSKMQFDARDDLGEAFWKLVSEAGLAQDSDYDQFKRRLHPYGDKFQPADSGAKLKFEADPPEPQAFHGRWYGAMSKRGNDAKELAAALYEHLHVDEKRIDGQPKRNPKTDKFAPGLVVARALGIESSVLPRGMARLARNWGEEEIQTYFVVDVAASVKEVAKAAVSAAQAFDPPRQVSGRSLSPKVGFALAEHLERVTGSKRCSFDPAAGPSVLALHDEVKKTYKRLCARGKNAARAFPADKTELLALMRHTHENRVRNQMVRMGRVSEYRGQQAGDLAQSHYWTSAGQTEIKESEIFVRLWVGAFALAGRSMKAWIDPMGKIVNTEKNDRDLTAAVNIRQVISNKEMVAEAMARRGIYFGETPELDRLGAEGNEGFVFALLRYLRGCRNQTFHLGARAGFLKEIRKELEKTRWGKAKEAEHVVLTDKTVAAIRAIIDNDAKALGARLLADLSGAFVAHYASKEHFSTLYSEIVKAVKDAPEVSSGLPRLKLLLKRADGVRGYVHGLRDTRKHAFATKLPPPPAPRELDDPATKARYIALLRLYDGPFRAYASGITGTALAGPAARAKEAATALAQSVNVTKAYSDVMEGRSSRLRPPNDGETLREYLSALTGETATEFRVQIGYESDSENARKQAEFIENYRRDMLAFMFEDYIRAKGFDWILKIEPGATAMTRAPVLPEPIDTRGQYEHWQAALYLVMHFVPASDVSNLLHQLRKWEALQGKYELVQDGDATDQADARREALDLVKRFRDVLVLFLKTGEARFEGRAAPFDLKPFRALFANPATFDRLFMATPTTARPAEDDPEGDGASEPELRVARTLRGLRQIARYNHMAVLSDLFAKHKVRDEEVARLAEIEDETQEKSQIVAAQELRTDLHDKVMKCHPKTISPEERQSYAAAIKTIEEHRFLVGRVYLGDHLRLHRLMMDVIGRLIDYAGAYERDTGTFLINASKQLGAGADWAVTIAGAANTDARTQTRKDLAHFNVLDRADGTPDLTALVNRAREMMAYDRKRKNAVPRSILDMLARLGLTLKWQMKDHLLQDATITQAAIKHLDKVRLTVGGPAAVTEARFSQDYLQMVAAVFNGSVQNPKPRRRDDGDAWHKPPKPATAQSQPDQKPPNKAPSAGSRLPPPQVGEVYEGVVVKVIDTGSLGFLAVEGVAGNIGLHISRLRRIREDAIIVGRRYRFRVEIYVPPKSNTSKLNAADLVRID

SEQ ID NO: 44 - protein, 1285 aa, Artificial Sequence; identical to SEQ ID NO: 43
  chemically synthesized

SEQ ID NO: 45 - protein, 1285 aa, Artificial Sequence
  chemically synthesized
MQIGKVQGRTISEFGDPAGGLKRKISTDGKNRKELPAHLSSDPKALIGQWISGIDKIYRKPDSRKSDGKAIHSPTPSKMQFDARDDLGEAFWKLVSEAGLAQDSDYDQFKRRLHPYGDKFQPADSGAKLKFEADPPEPQAFHGRWYGAMSKRGNDAKELAAALYEHLHVDEKRIDGQPKRNPKTDKFAPGLVVARALGIESSVLPRGMARLARNWGEEEIQTYFVVDVAASVKEVAKAAVSAAQAFDPPRQVSGRSLSPKVGFALAEHLERVTGSKRCSFDPAAGPSVLALHDEVKKTYKRLCARGKNAARAFPADKTELLALMRHTHENRVRNQMVRMGRVSEYRGQQAGDLAQSHYWTSAGQTEIKESEIFVRLWVGAFALAGRSMKAWIDPMGKIVNTEKNDRDLTAAVNIRQVISNKEMVAEAMARRGIYFGETPELDRLGAEGNEGFVFALLRYLRGCRNQTFHLGARAGFLKEIRKELEKTRWGKAKEAEHVVLTDKTVAAIRAIIDNDAKALGARLLADLSGAFVAHYASKEHFSTLYSEIVKAVKDAPEVSSGLPRLKLLLKRADGVRGYVHGLRDTRKHAFATKLPPPPAPRELDDPATKARYIALLRLYDGPFRAYASGITGTALAGPAARAKEAATALAQSVNVTKAYSDVMEGRTSRLRPPNDGETLREYLSALTGETATEFRVQIGYESDSENARKQAEFIENYRRDMLAFMFEDYIRAKGFDWILKIEPGATAMTRAPVLPEPIDTRGQYEHWQAALYLVMHFVPASDVSNLLHQLRKWEALQGKYELVQDGDATDQADARREALDLVKRFRDVLVLFLKTGEARFEGRAAPFDLKPFRALFANPATFDRLFMATPTTARPAEDDPEGDGASEPELRVARTLRGLRQIARYNHMAVLSDLFAKHKVRDEEVARLAEIEDETQEKSQIVAAQELRTDLHDKVMKCHPKTISPEERQSYAAAIKTIEEHRFLVGRVYLGDHLRLHRLMMDVIGRLIDYAGAYERDTGTFLINASKQLGAGADWAVTIAGAANTDARTQTRKDLAHFNVLDRADGTPDLTALVNRAREMMAYDRKRKNAVPRSILDMLARLGLTLKWQMKDHLLQDATITQAAIKHLDKVRLTVGGPAAVTEARFSQDYLQMVAAVFNGSVQNPKPRRRDDGDAWHKPPKPATAQSQPDQKPPNKAPSAGSRLPPPQVGEVYEGVVVKVIDTGSLGFLAVEGVAGNIGLHISRLRRIREDAIIVGRRYRFRVEIYVPPKSNTSKLNAADLVRID

SEQ ID NO: 46 - protein, 922 aa, Artificial Sequence
  chemically synthesized
MAKKNKMKPRELREAQKKARQLKAAEINNNAAPAIAAMPAAEVIAPVAEKKKSSVKAAGMKSILVSENKMYITSFGKGNSAVLEYEVDNNDYNKTQLSSKDNSNIELGDVNEVNITFSSKHGFGSGVEINTSNPTHRSGESSPVRGDMLGLKSELEKRFFGKTFDDNIHIQLIYNILDIEKILAVYVTNIVYALNNMLGIKDSESYDDFMGYLSARNTYEVFTHPDKSNLSDKVKGNIKKSLSKFNDLLKTKRLGYFGLEEPKTKDTRASEAYKKRVYHMLAIVGQIRQCVFHDKSGAKRFDLYSFINNIDPEYRDTLDYLVEERLKSINKDFIEGNKVNISLLIDMMKGYEADDIIRLYYDFIVLKSQKNLGFSIKKLREKMLEEYGFRFKDKQYDSVRSKMYKLMDFLLFCNYYRNDVAAGEALVRKLRFSMTDDEKEGIYADEAAKLWGKFRNDFENIADHMNGDVIKELGKADMDFDEKILDSEKKNASDLLYFSKMIYMLTYFLDGKEINDLLTTLISKFDNIKEFLKIMKSSAVDVECELTAGYKLFNDSQRITNELFIVKNIASMRKPAASAKLTMFRDALTILGIDDNITDDRISEILKLKEKGKGIHGLRNFITNNVIESSRFVYLIKYANAQKIREVAKNEKVVMFVLGGIPDTQIERYYKSCVEFPDMNSSLEAKRSELARMIKNISFDDFKNVKQQAKGRENVAKERAKAVIGLYLTVMYLLVKNLVNVNARYVIAIHCLERDFGLYKEIIPELASKNLKNDYRILSQTLCELCDDRNESSNLFLKKNKRLRKCVEVDINNADSSMTRKYRNCIAHLTVVRELKEYIGDIRTVDSYFSIYHYVMQRCITKRGDDTKQEEKIKYEDDLLKNHGYTKDFVKALNSPFGYNIPRFKNLSIEQLFDRNEYLTEK

SEQ ID NO: 47 - protein, 1089 aa, Artificial Sequence
  chemically synthesized
NIPALVENQKKYFGTYSVMAMLNAQTVLDHIQKVADIEGEQNENNENLWFHPVMSHLYNAKNGYDKQPEKTMFIIERLQSYFPFLKIMAENQREYSNGKYKQNRVEVNSNDIFEVLKRAFGVLKMYRDLTNAYKTYEEKLNDGCEFLTSTEQPLSGMINNYYTVALRNMNERYGYKTEDLAFIQDKRFKFVKDAYGKKKSQVNTGFFLSLQDYNGDTQKKLHLSGVGIALLICLFLDKQYINIFLSRLPIFSSYNAQSEERRIIIRSFGINSIKLPKDRIHSEKSNKSVAMDMLNEVKRCPDELFTTLSAEKQSRFRIISDDHNEVLMKRSSDRFVPLLLQYIDYGKLFDHIRFHVNMGKLRYLLKADKTCIDGQTRVRVIEQPLNGFGRLEEAETMRKQENGTFGNSGIRIRDFENMKRDDANPANYPYIVDTYTHYILENNKVEMFINDKEDSAPLLPVIEDDRYVVKTIPSCRMSTLEIPAMAFHMFLFGSKKTEKLIVDVHNRYKRLFQAMQKEEVTAENIASFGIAESDLPQKILDLISGNAHGKDVDAFIRLTVDDMLTDTERRIKRFKDDRKSIRSADNKMGKRGFKQISTGKLADFLAKDIVLFQPSVNDGENKITGLNYRIMQSAIAVYDSGDDYEAKQQFKLMFEKARLIGKGTTEPHPFLYKVFARSIPANAVEFYERYLIERKFYLTGLSNEIKKGNRVDVPFIRRDQNKWKTPAMKTLGRIYSEDLPVELPRQMFDNEIKSHLKSLPQMEGIDFNNANVTYLIAEYMKRVLDDDFQTFYQWNRNYRYMDMLKGEYDRKGSLQHCFTSVEEREGLWKERASRTERYRKQASNKIRSNRQMRNASSEEIETILDKRLSNSRNEYQKSEKVIRRYRVQDALLFLLAKKTLTELADFDGERFKLKEIMPDAEKGILSEIMPMSFTFEKGGKKYTITSEGMKLKNYGDFFVLASDKRIGNLLELVGSDIVSKEDIMEEFNKYDQCRPEISSIVFNLEKWAFDTYPELSARVDREEKVDFKSILKILLNNKNINKEQSDILRKIRNAFDANNYPDKGVVEIKALPEIAMSIKKAFGEYAIMK

SEQ ID NO: 48 - protein, 982 aa, Artificial Sequence
  chemically synthesized
NIPALVENQKKYFGTYSVMAMLNAQTVLDHIQKVADIEGEQNENNENLWFHPVMSHLYNAKNGYDKQPEKTMFIIERLQSYFPFLKIMAENQREYSNGKYKQNRVEVNSNDIFEVLKRAFGVLKMYRDLTNAYKTYEEKLNDGCEFLTSTEQPLSGMINNYYTVALRNMNERYGYKTEDLAFIQDKRFKFVKDAYGKKKSQVNTGFFLSLQDYNGDTQKKLHLSGVGIALLICLFLDKQYINIFLSRLPIFSSYNAQSEERRIIIRSFGINSIKLPKDRIHSEKSNKSVAMDMLNEVKRCPDELFTTLSAEKQSRFRIISDDHNEVLMKRSSDRFVPLLLQYIDYGKLFDHIRFHVNMGKLRYLLKADKTCIDGQTRVRVIEQPLNGFGRLEEAETMRKQENGTFGNSGIRIRDFENMKRDDANPANYPYIVDTYTHYILENNKVEMFINDKEDSAPLLPVIEDDRYVVKTIPSCRMSTLEIPAMAFHMFLFGSKKTEKLIVDVHNRYKRLFQAMQKEEVTAENIASFGIAESDLPQKILDLISGNAHGKDVDAFIRLTVDDMLTDTERRIKRFKDDRKSIRSADNKMGKRGFKQISTGKLADFLAKDIVLFQPSVNDGENKITGLNYRIMQSAIAVYDSGDDYEAKQQFKLMFEKARLIGKGTTEPHPFLYKVFARSIPANAVEFYERYLIERKFYLTGLSNEIKKGNRVDVPFIRRDQNKWKTPAMKTLGRIYSEDLPVELPRQMFDNEIKSHLKSLPQMEGIDFNNANVTYLIAEYMKRVLDDDFQTFYQWNRNYRYMDMLKGEYDRKGSLQHCFTSVEEREGLWKERASRTERYRKQASNKIRSNRQMRNASSEEIETILDKRLSNSRNEYQKSEKVIRRYRVQDALLFLLAKKTLTELADFDGERFKLKEIMPDAEKGILSEIMPMSFTFEKGGKKYTITSEGMKLKNYGDFFVLASDKRIGNLLELVGSDIVSKED

SEQ ID NO: 49 - protein, 238 aa, Artificial Sequence
  chemically synthesized
VSKGEELFTGVVPILVELDGDVNGHKFSVSGEGEGDATYGKLTLKFICTTGKLPVPWPTLVTTLTYGVQCFSRYPDHMKQHDFFKSAMPEGYVQERTIFFKDDGNYKTRAEVKFEGDTLVNRIELKGIDFKEDGNILGHKLEYNYNSHNVYIMADKQKNGIKVNFKIRHNIEDGSVQLADHYQQNTPIGDGPVLLPDNHYLSTQSALSKDPNEKRDHMVLLEFVTAAGITLGMDELYK

SEQ ID NO: 50 - protein, 236 aa, Artificial Sequence
  chemically synthesized
MVSKGEEDNMAIIKEFMRFKVHMEGSVNGHEFEIEGEGEGRPYEGTQTAKLKVTKGGPLPFAWDILSPQFMYGSKAYVKHPADIPDYLKLSFPEGFKWERVMNFEDGGVVTVTQDSSLQDGEFIYKVKLRGTNFPSDGPVMQKKTMGWEASSERMYPEDGALKGEIKQRLKLKDGGHYDAEVKTTYKAKKPVQLPGAYNVNIKLDITSHNEDYTIVEQYERAEGRHSTGGMDELYK

SEQ ID NO: 51 - protein, 233 aa, Artificial Sequence
  chemically synthesized
MEEDNMAIIKEFMRFKVHMEGSVNGHEFEIEGEGEGHPYEGTQTAKLKVTKGGPLPFAWDILSPQFMYGSKAYVKHPADIPDYLKLSFPEGFTWERVMNFEDGGVVTVTQDSSLQDGQFIYKVKLLGINFPSDGPVMQKKTMGWEASTERMYPEDGALKGEINQRLKLKDGGHYDAEVKTTYKAKKPVQLPGAYNVDIKLDITSHNEDRPDPENFRLLGNVLVIVLSHHFGKE

SEQ ID NO: 52 - protein, 238 aa, Artificial Sequence
  chemically synthesized
MEEDNMAIIKEFMRFKVHMEGSVNGHEFEIEGEGEGHPYEGTQTAKLKVTKGGPLPFAWDILSPQFMYGSKAYVKHPADIPDYLKLSFPEGFTWERVMNFEDGGVVTVTQDSSLQDGQFIYKVKLLGINFPSDGPVMQKKTMGWEASTERMYPEDGALKGEINQRLKLKDGGHYDAEVKTTYKAKKPVQLPGAYNVDIKLDITSHNEDRPDPENFRVSLGTLYTIVEQYERAEARHST

SEQ ID NO: 53 - protein, 142 aa, Artificial Sequence
  chemically synthesized
RDHMVLHEYVNAAGITGGSGGRDHMVLHEYVNAAGITGGSGGRDHMVLHEYVNAAGITGGSGGRDHMVLHEYVNAAGITGGSGGRDHMVLHEYVNAAGITGGSGGRDHMVLHEYVNAAGITGGSGGRDHMVLHEYVNAAGIT

SEQ ID NO: 54 - protein, 214 aa, Artificial Sequence
  chemically synthesized
MSKGEELFTGVVPILVELDGDVNGHKFSVRGEGEGDATIGKLTLKFICTTGKLPVPWPTLVTTLTYGVQCFSRYPDHMKRHDFFKSAMPEGYVQERTISFKDDGKYKTRAVVKFEGDTLVNRIELKGTDFKEDGNILGHKLEYNFNSHNVYITADKQKNGIKANFTVRHNVEDGSVQLADHYQQNTPIGDGPVLLPDNHYLSTQTVLSKDPNEK

SEQ ID NO: 55 - protein, 239 aa, Artificial Sequence
  chemically synthesized
MSKGEELFTGVVPILVELDGDVNGHKFSVRGEGEGDATNGKLTLKFICTTGKLPVPWPTLVTTLTYGVQCFSRYPDHMKRHDFFKSAMPEGYVQERTISFKDDGTYKTRAEVKFEGDTLVNRIELKGIDFKEDGNILGHKLEYNFNSHNVYITADKQKNGIKANFKIRHNVEDGSVQLADHYQQNTPIGDGPVLLPDNHYLSTQSVLSKDPNEKRPDPENFRLLGNVLVIVLSHHFGKE

SEQ ID NO: 56 - protein, 244 aa, Artificial Sequence
  chemically synthesized
MSKGEELFTGVVPILVELDGDVNGHKFSVRGEGEGDATNGKLTLKFICTTGKLPVPWPTLVTTLTYGVQCFSRYPDHMKRHDFFKSAMPEGYVQERTISFKDDGTYKTRAEVKFEGDTLVNRIELKGIDFKEDGNILGHKLEYNFNSHNVYITADKQKNGIKANFKIRHNVEDGSVQLADHYQQNTPIGDGPVLLPDNHYLSTQSVLSKDPNEKRPDPENFRVSLGTLRDHMVLLEFVTAAGIT

SEQ ID NO: 57 - protein, 14 aa, Artificial Sequence
  chemically synthesized
SRGGGGSGGGGSTR

SEQ ID NO: 58 - protein, 13 aa, Artificial Sequence
  chemically synthesized
RGGGGSGGGGSTR

SEQ ID NO: 59 - protein, 13 aa, Artificial Sequence
  chemically synthesized
GGGGSGGGGSLEP

SEQ ID NO: 60 - protein, 4 aa, Artificial Sequence
  chemically synthesized
GGGG

SEQ ID NO: 61 - protein, 10 aa, Artificial Sequence
  chemically synthesized
GGGGSGGGGS

SEQ ID NO: 62 - protein, 5 aa, Artificial Sequence
  chemically synthesized
EAAAK

SEQ ID NO: 63 - protein, 10 aa, Artificial Sequence
  chemically synthesized
EAAAKEAAAK

SEQ ID NO: 64 - protein, 12 aa, Artificial Sequence
  chemically synthesized
KAEEEKKAAEEK

SEQ ID NO: 65 - protein, 16 aa, Artificial Sequence
  chemically synthesized
SGSETPGTSESATPES

SEQ ID NO: 66 - protein, 22 aa, Artificial Sequence
  chemically synthesized
DYKDHDGDYKDHDIDYKDDDDK

SEQ ID NO: 67 - protein, 39 aa, Artificial Sequence
  chemically synthesized
NSKKRSLEDNETEIKVSRDTWNTKNMRSLEPPRSKKRIH

SEQ ID NO: 68 - protein, 39 aa, Artificial Sequence
  chemically synthesized
KSKKRSLEDNETEIEVSRDTWNNKNMRSLEPPRSKKRIN

SEQ ID NO: 69 - protein, 43 aa, Artificial Sequence
  chemically synthesized
TMKKRDAETADIGDQSEVESDTEELKKIMFGEKKKLNKKKRKQ

SEQ ID NO: 70 - protein, 9 aa, Artificial Sequence
  chemically synthesized
PKKKRKVSS

SEQ ID NO: 71 - protein, 24 aa, Artificial Sequence
  chemically synthesized
DPKKKRKVDPKKKRKVDPKKKRKV

SEQ ID NO: 72 - protein, 16 aa, Artificial Sequence
  chemically synthesized
KRPAATKKAGQAKKKK

SEQ ID NO: 73 - protein, 37 aa, Artificial Sequence
  chemically synthesized
RQKKRVYYDDGLTEEQFLEAVEDDNMSLEDAIKKRRE

SEQ ID NO: 74 - protein, 33 aa, Artificial Sequence
  chemically synthesized
NVKKRKRRSKKINKLTDGQIRINHVSSEKKRRE

SEQ ID NO: 75 - protein, 11 aa, Artificial Sequence
  chemically synthesized
LQLPPLERLTL

SEQ ID NO: 76 - protein, 16 aa, Artificial Sequence
  chemically synthesized
GSLQLPPLERLTLGSS

SEQ ID NO: 77 - protein, 32 aa, Artificial Sequence
  chemically synthesized
MSVLTPLLLRGLTGSARRLPVPRAKIHSLGDP

SEQ ID NO: 78 - protein, 130 aa, Artificial Sequence
  chemically synthesized
MSVLTPLLLRGLTGSARRLPVPRAKIHSLGDPMSVLTPLLLRGLTGSARRLPVPRAKIHSLGKLATMSVLTPLLLRGLTGSARRLPVPRAKIHSLGDPMSVLTPLLLRGLTGSARRLPVPRAKIHSLGKL

SEQ ID NO: 79 - protein, 20 aa, Artificial Sequence
  chemically synthesized
MYRMQLLSCIALSLALVTNS

SEQ ID NO: 80 - protein, 43 aa, Artificial Sequence
  chemically synthesized
MGCCFSKTAAKGEAAAERPGEAAVASSPSKANGQENGHVKVGS

SEQ ID NO: 81 - protein, 17 aa, Artificial Sequence
  chemically synthesized
MLLPVPLLLGLLGAAAD

SEQ ID NO: 82 - protein, 9 aa, Artificial Sequence
  chemically synthesized
GITLGKDEL

SEQ ID NO: 83 - protein, 3 aa, Artificial Sequence
  chemically synthesized
SKL

SEQ ID NO: 84 - protein, 1407 aa, Artificial Sequence
  chemically synthesized
MDYKDHDGDYKDHDIDYKDDDDKGGNSKKRSLEDNETEIKVSRDTWNTKNMRSLEPPRSKKRIHGGNIPALVENQKKYFGTYSVMAMLNAQTVLDHIQKVADIEGEQNENNENLWFHPVMSHLYNAKNGYDKQPEKTMFIIERLQSYFPFLKIMAENQREYSNGKYKQNRVEVNSNDIFEVLKRAFGVLKMYRDLTNAYKTYEEKLNDGCEFLTSTEQPLSGMINNYYTVALRNMNERYGYKTEDLAFIQDKRFKFVKDAYGKKKSQVNTGFFLSLQDYNGDTQKKLHLSGVGIALLICLFLDKQYINIFLSRLPIFSSYNAQSEERRIIIRSFGINSIKLPKDRIHSEKSNKSVAMDMLNEVKRCPDELFTTLSAEKQSRFRIISDDHNEVLMKRSSDRFVPLLLQYIDYGKLFDHIRFHVNMGKLRYLLKADKTCIDGQTRVRVIEQPLNGFGRLEEAETMRKQENGTFGNSGIRIRDFENMKRDDANPANYPYIVDTYTHYILENNKVEMFINDKEDSAPLLPVIEDDRYVVKTIPSCRMSTLEIPAMAFHMFLFGSKKTEKLIVDVHNRYKRLFQAMQKEEVTAENIASFGIAESDLPQKILDLISGNAHGKDVDAFIRLTVDDMLTDTERRIKRFKDDRKSIRSADNKMGKRGFKQISTGKLADFLAKDIVLFQPSVNDGENKITGLNYRIMQSAIAVYDSGDDYEAKQQFKLMFEKARLIGKGTTEPHPFLYKVFARSIPANAVEFYERYLIERKFYLTGLSNEIKKGNRVDVPFIRRDQNKWKTPAMKTLGRIYSEDLPVELPRQMFDNEIKSHLKSLPQMEGIDFNNANVTYLIAEYMKRVLDDDFQTFYQWNRNYRYMDMLKGEYDRKGSLQHCFTSVEEREGLWKERASRTERYRKQASNKIRSNRQMRNASSEEIETILDKRLSNSRNEYQKSEKVIRRYRVQDALLFLLAKKTLTELADFDGERFKLKEIMPDAEKGILSEIMPMSFTFEKGGKKYTITSEGMKLKNYGDFFVLASDKRIGNLLELVGSDIVSKEDIMEEFNKYDQCRPEISSIVFNLEKWAFDTYPELSARVDREEKVDFKSILKILLNNKNINKEQSDILRKIRNAFDANNYPDKGVVEIKALPEIAMSIKKAFGEYAIMKSRGGGGSGGGGSTRVSKGEELFTGVVPILVELDGDVNGHKFSVSGEGEGDATYGKLTLKFICTTGKLPVPWPTLVTTLTYGVQCFSRYPDHMKQHDFFKSAMPEGYVQERTIFFKDDGNYKTRAEVKFEGDTLVNRIELKGIDFKEDGNILGHKLEYNYNSHNVYIMADKQKNGIKVNFKIRHNIEDGSVQLADHYQQNTPIGDGPVLLPDNHYLSTQSALSKDPNEKRDHMVLLEFVTAAGITLGMDELYK

SEQ ID NO: 85 - protein, 1407 aa, Artificial Sequence
  chemically synthesized
MDYKDHDGDYKDHDIDYKDDDDKGGKSKKRSLEDNETEIEVSRDTWNNKNMRSLEPPRSKKRINGGNIPALVENQKKYFGTYSVMAMLNAQTVLDHIQKVADIEGEQNENNENLWFHPVMSHLYNAKNGYDKQPEKTMFIIERLQSYFPFLKIMAENQREYSNGKYKQNRVEVNSNDIFEVLKRAFGVLKMYRDLTNAYKTYEEKLNDGCEFLTSTEQPLSGMINNYYTVALRNMNERYGYKTEDLAFIQDKRFKFVKDAYGKKKSQVNTGFFLSLQDYNGDTQKKLHLSGVGIALLICLFLDKQYINIFLSRLPIFSSYNAQSEERRIIIRSFGINSIKLPKDRIHSEKSNKSVAMDMLNEVKRCPDELFTTLSAEKQSRFRIISDDHNEVLMKRSSDRFVPLLLQYIDYGKLFDHIRFHVNMGKLRYLLKADKTCIDGQTRVRVIEQPLNGFGRLEEAETMRKQENGTFGNSGIRIRDFENMKRDDANPANYPYIVDTYTHYILENNKVEMFINDKEDSAPLLPVIEDDRYVVKTIPSCRMSTLEIPAMAFHMFLFGSKKTEKLIVDVHNRYKRLFQAMQKEEVTAENIASFGIAESDLPQKILDLISGNAHGKDVDAFIRLTVDDMLTDTERRIKRFKDDRKSIRSADNKMGKRGFKQISTGKLADFLAKDIVLFQPSVNDGENKITGLNYRIMQSAIAVYDSGDDYEAKQQFKLMFEKARLIGKGTTEPHPFLYKVFARSIPANAVEFYERYLIERKFYLTGLSNEIKKGNRVDVPFIRRDQNKWKTPAMKTLGRIYSEDLPVELPRQMFDNEIKSHLKSLPQMEGIDFNNANVTYLIAEYMKRVLDDDFQTFYQWNRNYRYMDMLKGEYDRKGSLQHCFTSVEEREGLWKERASRTERYRKQASNKIRSNRQMRNASSEEIETILDKRLSNSRNEYQKSEKVIRRYRVQDALLFLLAKKTLTELADFDGERFKLKEIMPDAEKGILSEIMPMSFTFEKGGKKYTITSEGMKLKNYGDFFVLASDKRIGNLLELVGSDIVSKEDIMEEFNKYDQCRPEISSIVFNLEKWAFDTYPELSARVDREEKVDFKSILKILLNNKNINKEQSDILRKIRNAFDANNYPDKGVVEIKALPEIAMSIKKAFGEYAIMKSRGGGGSGGGGSTRVSKGEELFTGVVPILVELDGDVNGHKFSVSGEGEGDATYGKLTLKFICTTGKLPVPWPTLVTTLTYGVQCFSRYPDHMKQHDFFKSAMPEGYVQERTIFFKDDGNYKTRAEVKFEGDTLVNRIELKGIDFKEDGNILGHKLEYNYNSHNVYIMADKQKNGIKVNFKIRHNIEDGSVQLADHYQQNTPIGDGPVLLPDNHYLSTQSALSKDPNEKRDHMVLLEFVTAAGITLGMDELYK

SEQ ID NO: 86 - protein, 1379 aa, Artificial Sequence
  chemically synthesized
MDYKDHDGDYKDHDIDYKDDDDKGGLQLPPLERLTLGGNIPALVENQKKYFGTYSVMAMLNAQTVLDHIQKVADIEGEQNENNENLWFHPVMSHLYNAKNGYDKQPEKTMFIIERLQSYFPFLKIMAENQREYSNGKYKQNRVEVNSNDIFEVLKRAFGVLKMYRDLTNAYKTYEEKLNDGCEFLTSTEQPLSGMINNYYTVALRNMNERYGYKTEDLAFIQDKRFKFVKDAYGKKKSQVNTGFFLSLQDYNGDTQKKLHLSGVGIALLICLFLDKQYINIFLSRLPIFSSYNAQSEERRIIIRSFGINSIKLPKDRIHSEKSNKSVAMDMLNEVKRCPDELFTTLSAEKQSRFRIISDDHNEVLMKRSSDRFVPLLLQYIDYGKLFDHIRFHVNMGKLRYLLKADKTCIDGQTRVRVIEQPLNGFGRLEEAETMRKQENGTFGNSGIRIRDFENMKRDDANPANYPYIVDTYTHYILENNKVEMFINDKEDSAPLLPVIEDDRYVVKTIPSCRMSTLEIPAMAFHMFLFGSKKTEKLIVDVHNRYKRLFQAMQKEEVTAENIASFGIAESDLPQKILDLISGNAHGKDVDAFIRLTVDDMLTDTERRIKRFKDDRKSIRSADNKMGKRGFKQISTGKLADFLAKDIVLFQPSVNDGENKITGLNYRIMQSAIAVYDSGDDYEAKQQFKLMFEKARLIGKGTTEPHPFLYKVFARSIPANAVEFYERYLIERKFYLTGLSNEIKKGNRVDVPFIRRDQNKWKTPAMKTLGRIYSEDLPVELPRQMFDNEIKSHLKSLPQMEGIDFNNANVTYLIAEYMKRVLDDDFQTFYQWNRNYRYMDMLKGEYDRKGSLQHCFTSVEEREGLWKERASRTERYRKQASNKIRSNRQMRNASSEEIETILDKRLSNSRNEYQKSEKVIRRYRVQDALLFLLAKKTLTELADFDGERFKLKEIMPDAEKGILSEIMPMSFTFEKGGKKYTITSEGMKLKNYGDFFVLASDKRIGNLLELVGSDIVSKEDIMEEFNKYDQCRPEISSIVFNLEKWAFDTYPELSARVDREEKVDFKSILKILLNNKNINKEQSDILRKIRNAFDANNYPDKGVVEIKALPEIAMSIKKAFGEYAIMKSRGGGGSGGGGSTRVSKGEELFTGVVPILVELDGDVNGHKFSVSGEGEGDATYGKLTLKFICTTGKLPVPWPTLVTTLTYGVQCFSRYPDHMKQHDFFKSAMPEGYVQERTIFFKDDGNYKTRAEVKFEGDTLVNRIELKGIDFKEDGNILGHKLEYNYNSHNVYIMADKQKNGIKVNFKIRHNIEDGSVQLADHYQQNTPIGDGPVLLPDNHYLSTQSALSKDPNEKRDHMVLLEFVTAAGITLGMDELYK

SEQ ID NO: 87 - protein, 1384 aa, Artificial Sequence
  chemically synthesized
MDYKDHDGDYKDHDIDYKDDDDKGGGSLQLPPLERLTLGSSGGNIPALVENQKKYFGTYSVMAMLNAQTVLDHIQKVADIEGEQNENNENLWFHPVMSHLYNAKNGYDKQPEKTMFIIERLQSYFPFLKIMAENQREYSNGKYKQNRVEVNSNDIFEVLKRAFGVLKMYRDLTNAYKTYEEKLNDGCEFLTSTEQPLSGMINNYYTVALRNMNERYGYKTEDLAFIQDKRFKFVKDAYGKKKSQVNTGFFLSLQDYNGDTQKKLHLSGVGIALLICLFLDKQYINIFLSRLPIFSSYNAQSEERRIIIRSFGINSIKLPKDRIHSEKSNKSVAMDMLNEVKRCPDELFTTLSAEKQSRFRIISDDHNEVLMKRSSDRFVPLLLQYIDYGKLFDHIRFHVNMGKLRYLLKADKTCIDGQTRVRVIEQPLNGFGRLEEAETMRKQENGTFGNSGIRIRDFENMKRDDANPANYPYIVDTYTHYILENNKVEMFINDKEDSAPLLPVIEDDRYVVKTIPSCRMSTLEIPAMAFHMFLFGSKKTEKLIVDVHNRYKRLFQAMQKEEVTAENIASFGIAESDLPQKILDLISGNAHGKDVDAFIRLTVDDMLTDTERRIKRFKDDRKSIRSADNKMGKRGFKQISTGKLADFLAKDIVLFQPSVNDGENKITGLNYRIMQSAIAVYDSGDDYEAKQQFKLMFEKARLIGKGTTEPHPFLYKVFARSIPANAVEFYERYLIERKFYLTGLSNEIKKGNRVDVPFIRRDQNKWKTPAMKTLGRIYSEDLPVELPRQMFDNEIKSHLKSLPQMEGIDFNNANVTYLIAEYMKRVLDDDFQTFYQWNRNYRYMDMLKGEYDRKGSLQHCFTSVEEREGLWKERASRTERYRKQASNKIRSNRQMRNASSEEIETILDKRLSNSRNEYQKSEKVIRRYRVQDALLFLLAKKTLTELADFDGERFKLKEIMPDAEKGILSEIMPMSFTFEKGGKKYTITSEGMKLKNYGDFFVLASDKRIGNLLELVGSDIVSKEDIMEEFNKYDQCRPEISSIVFNLEKWAFDTYPELSARVDREEKVDFKSILKILLNNKNINKEQSDILRKIRNAFDANNYPDKGVVEIKALPEIAMSIKKAFGEYAIMKSRGGGGSGGGGSTRVSKGEELFTGVVPILVELDGDVNGHKFSVSGEGEGDATYGKLTLKFICTTGKLPVPWPTLVTTLTYGVQCFSRYPDHMKQHDFFKSAMPEGYVQERTIFFKDDGNYKTRAEVKFEGDTLVNRIELKGIDFKEDGNILGHKLEYNYNSHNVYIMADKQKNGIKVNFKIRHNIEDGSVQLADHYQQNTPIGDGPVLLPDNHYLSTQSALSKDPNEKRDHMVLLEFVTAAGITLGMDELYK

SEQ ID NO: 88 - protein, 1400 aa, Artificial Sequence
  chemically synthesized
MDYKDHDGDYKDHDIDYKDDDDKGGMSVLTPLLLRGLTGSARRLPVPRAKIHSLGDPGGNIPALVENQKKYFGTYSVMAMLNAQTVLDHIQKVADIEGEQNENNENLWFHPVMSHLYNAKNGYDKQPEKTMFIIERLQSYFPFLKIMAENQREYSNGKYKQNRVEVNSNDIFEVLKRAFGVLKMYRDLTNAYKTYEEKLNDGCEFLTSTEQPLSGMINNYYTVALRNMNERYGYKTEDLAFIQDKRFKFVKDAYGKKKSQVNTGFFLSLQDYNGDTQKKLHLSGVGIALLICLFLDKQYINIFLSRLPIFSSYNAQSEERRIIIRSFGINSIKLPKDRIHSEKSNKSVAMDMLNEVKRCPDELFTTLSAEKQSRFRIISDDHNEVLMKRSSDRFVPLLLQYIDYGKLFDHIRFHVNMGKLRYLLKADKTCIDGQTRVRVIEQPLNGFGRLEEAETMRKQENGTFGNSGIRIRDFENMKRDDANPANYPYIVDTYTHYILENNKVEMFINDKEDSAPLLPVIEDDRYVVKTIPSCRMSTLEIPAMAFHMFLFGSKKTEKLIVDVHNRYKRLFQAMQKEEVTAENIASFGIAESDLPQKILDLISGNAHGKDVDAFIRLTVDDMLTDTERRIKRFKDDRKSIRSADNKMGKRGFKQISTGKLADFLAKDIVLFQPSVNDGENKITGLNYRIMQSAIAVYDSGDDYEAKQQFKLMFEKARLIGKGTTEPHPFLYKVFARSIPANAVEFYERYLIERKFYLTGLSNEIKKGNRVDVPFIRRDQNKWKTPAMKTLGRIYSEDLPVELPRQMFDNEIKSHLKSLPQMEGIDFNNANVTYLIAEYMKRVLDDDFQTFYQWNRNYRYMDMLKGEYDRKGSLQHCFTSVEEREGLWKERASRTERYRKQASNKIRSNRQMRNASSEEIETILDKRLSNSRNEYQKSEKVIRRYRVQDALLFLLAKKTLTELADFDGERFKLKEIMPDAEKGILSEIMPMSFTFEKGGKKYTITSEGMKLKNYGDFFVLASDKRIGNLLELVGSDIVSKEDIMEEFNKYDQCRPEISSIVFNLEKWAFDTYPELSARVDREEKVDFKSILKILLNNKNINKEQSDILRKIRNAFDANNYPDKGVVEIKALPEIAMSIKKAFGEYAIMKSRGGGGSGGGGSTRVSKGEELFTGVVPILVELDGDVNGHKFSVSGEGEGDATYGKLTLKFICTTGKLPVPWPTLVTTLTYGVQCFSRYPDHMKQHDFFKSAMPEGYVQERTIFFKDDGNYKTRAEVKFEGDTLVNRIELKGIDFKEDGNILGHKLEYNYNSHNVYIMADKQKNGIKVNFKIRHNIEDGSVQLADHYQQNTPIGDGPVLLPDNHYLSTQSALSKDPNEKRDHMVLLEFVTAAGITLGMDELYK

SEQ ID NO: 89 - protein, 1498 aa, Artificial Sequence
  chemically synthesized
MDYKDHDGDYKDHDIDYKDDDDKGGMSVLTPLLLRGLTGSARRLPVPRAKIHSLGDPMSVLTPLLLRGLTGSARRLPVPRAKIHSLGKLATMSVLTPLLLRGLTGSARRLPVPRAKIHSLGDPMSVLTPLLLRGLTGSARRLPVPRAKIHSLGKLGGNIPALVENQKKYFGTYSVMAMLNAQTVLDHIQKVADIEGEQNENNENLWFHPVMSHLYNAKNGYDKQPEKTMFIIERLQSYFPFLKIMAENQREYSNGKYKQNRVEVNSNDIFEVLKRAFGVLKMYRDLTNAYKTYEEKLNDGCEFLTSTEQPLSGMINNYYTVALRNMNERYGYKTEDLAFIQDKRFKFVKDAYGKKKSQVNTGFFLSLQDYNGDTQKKLHLSGVGIALLICLFLDKQYINIFLSRLPIFSSYNAQSEERRIIIRSFGINSIKLPKDRIHSEKSNKSVAMDMLNEVKRCPDELFTTLSAEKQSRFRIISDDHNEVLMKRSSDRFVPLLLQYIDYGKLFDHIRFHVNMGKLRYLLKADKTCIDGQTRVRVIEQPLNGFGRLEEAETMRKQENGTFGNSGIRIRDFENMKRDDANPANYPYIVDTYTHYILENNKVEMFINDKEDSAPLLPVIEDDRYVVKTIPSCRMSTLEIPAMAFHMFLFGSKKTEKLIVDVHNRYKRLFQAMQKEEVTAENIASFGIAESDLPQKILDLISGNAHGKDVDAFIRLTVDDMLTDTERRIKRFKDDRKSIRSADNKMGKRGFKQISTGKLADFLAKDIVLFQPSVNDGENKITGLNYRIMQSAIAVYDSGDDYEAKQQFKLMFEKARLIGKGTTEPHPFLYKVFARSIPANAVEFYERYLIERKFYLTGLSNEIKKGNRVDVPFIRRDQNKWKTPAMKTLGRIYSEDLPVELPRQMFDNEIKSHLKSLPQMEGIDFNNANVTYLIAEYMKRVLDDDFQTFYQWNRNYRYMDMLKGEYDRKGSLQHCFTSVEEREGLWKERASRTERYRKQASNKIRSNRQMRNASSEEIETILDKRLSNSRNEYQKSEKVIRRYRVQDALLFLLAKKTLTELADFDGERFKLKEIMPDAEKGILSEIMPMSFTFEKGGKKYTITSEGMKLKNYGDFFVLASDKRIGNLLELVGSDIVSKEDIMEEFNKYDQCRPEISSIVFNLEKWAFDTYPELSARVDREEKVDFKSILKILLNNKNINKEQSDILRKIRNAFDANNYPDKGVVEIKALPEIAMSIKKAFGEYAIMKSRGGGGSGGGGSTRVSKGEELFTGVVPILVELDGDVNGHKFSVSGEGEGDATYGKLTLKFICTTGKLPVPWPTLVTTLTYGVQCFSRYPDHMKQHDFFKSAMPEGYVQERTIFFKDDGNYKTRAEVKFEGDTLVNRIELKGIDFKEDGNILGHKLEYNYNSHNVYIMADKQKNGIKVNFKIRHNIEDGSVQLADHYQQNTPIGDGPVLLPDNHYLSTQSALSKDPNEKRDHMVLLEFVTAAGITLGMDELYK

SEQ ID NO: 90 - protein, 1389 aa, Artificial Sequence
  chemically synthesized
MDYKDHDGDYKDHDIDYKDDDDKGGMYRMQLLSCIALSLALVTNSLGGNIPALVENQKKYFGTYSVMAMLNAQTVLDHIQKVADIEGEQNENNENLWFHPVMSHLYNAKNGYDKQPEKTMFIIERLQSYFPFLKIMAENQREYSNGKYKQNRVEVNSNDIFEVLKRAFGVLKMYRDLTNAYKTYEEKLNDGCEFLTSTEQPLSGMINNYYTVALRNMNERYGYKTEDLAFIQDKRFKFVKDAYGKKKSQVNTGFFLSLQDYNGDTQKKLHLSGVGIALLICLFLDKQYINIFLSRLPIFSSYNAQSEERRIIIRSFGINSIKLPKDRIHSEKSNKSVAMDMLNEVKRCPDELFTTLSAEKQSRFRIISDDHNEVLMKRSSDRFVPLLLQYIDYGKLFDHIRFHVNMGKLRYLLKADKTCIDGQTRVRVIEQPLNGFGRLEEAETMRKQENGTFGNSGIRIRDFENMKRDDANPANYPYIVDTYTHYILENNKVEMFINDKEDSAPLLPVIEDDRYVVKTIPSCRMSTLEIPAMAFHMFLFGSKKTEKLIVDVHNRYKRLFQAMQKEEVTAENIASFGIAESDLPQKILDLISGNAHGKDVDAFIRLTVDDMLTDTERRIKRFKDDRKSIRSADNKMGKRGFKQISTGKLADFLAKDIVLFQPSVNDGENKITGLNYRIMQSAIAVYDSGDDYEAKQQFKLMFEKARLIGKGTTEPHPFLYKVFARSIPANAVEFYERYLIERKFYLTGLSNEIKKGNRVDVPFIRRDQNKWKTPAMKTLGRIYSEDLPVELPRQMFDNEIKSHLKSLPQMEGIDFNNANVTYLIAEYMKRVLDDDFQTFYQWNRNYRYMDMLKGEYDRKGSLQHCFTSVEEREGLWKERASRTERYRKQASNKIRSNRQMRNASSEEIETILDKRLSNSRNEYQKSEKVIRRYRVQDALLFLLAKKTLTELADFDGERFKLKEIMPDAEKGILSEIMPMSFTFEKGGKKYTITSEGMKLKNYGDFFVLASDKRIGNLLELVGSDIVSKEDIMEEFNKYDQCRPEISSIVFNLEKWAFDTYPELSARVDREEKVDFKSILKILLNNKNINKEQSDILRKIRNAFDANNYPDKGVVEIKALPEIAMSIKKAFGEYAIMKSRGGGGSGGGGSTRVSKGEELFTGVVPILVELDGDVNGHKFSVSGEGEGDATYGKLTLKFICTTGKLPVPWPTLVTTLTYGVQCFSRYPDHMKQHDFFKSAMPEGYVQERTIFFKDDGNYKTRAEVKFEGDTLVNRIELKGIDFKEDGNILGHKLEYNYNSHNVYIMADKQKNGIKVNFKIRHNIEDGSVQLADHYQQNTPIGDGPVLLPDNHYLSTQSALSKDPNEKRDHMVLLEFVTAAGITLGMDELYK

SEQ ID NO: 91 - protein, 1159 aa, Artificial Sequence
  chemically synthesized
MDYKDHDGDYKDHDIDYKDDDDKGGMGCCFSKTAAKGEAAAERPGEAAVASSPSKANGQENGHVKVGSGGNIPALVENQKKYFGTYSVMAMLNAQTVLDHIQKVADIEGEQNENNENLWFHPVMSHLYNAKNGYDKQPEKTMFIIERLQSYFPFLKIMAENQREYSNGKYKQNRVEVNSNDIFEVLKRAFGVLKMYRDLTNAYKTYEEKLNDGCEFLTSTEQPLSGMINNYYTVALRNMNERYGYKTEDLAFIQDKRFKFVKDAYGKKKSQVNTGFFLSLQDYNGDTQKKLHLSGVGIALLICLFLDKQYINIFLSRLPIFSSYNAQSEERRIIIRSFGINSIKLPKDRIHSEKSNKSVAMDMLNEVKRCPDELFTTLSAEKQSRFRIISDDHNEVLMKRSSDRFVPLLLQYIDYGKLFDHIRFHVNMGKLRYLLKADKTCIDGQTRVRVIEQPLNGFGRLEEAETMRKQENGTFGNSGIRIRDFENMKRDDANPANYPYIVDTYTHYILENNKVEMFINDKEDSAPLLPVIEDDRYVVKTIPSCRMSTLEIPAMAFHMFLFGSKKTEKLIVDVHNRYKRLFQAMQKEEVTAENIASFGIAESDLPQKILDLISGNAHGKDVDAFIRLTVDDMLTDTERRIKRFKDDRKSIRSADNKMGKRGFKQISTGKLADFLAKDIVLFQPSVNDGENKITGLNYRIMQSAIAVYDSGDDYEAKQQFKLMFEKARLIGKGTTEPHPFLYKVFARSIPANAVEFYERYLIERKFYLTGLSNEIKKGNRVDVPFIRRDQNKWKTPAMKTLGRIYSEDLPVELPRQMFDNEIKSHLKSLPQMEGIDFNNANVTYLIAEYMKRVLDDDFQTFYQWNRNYRYMDMLKGEYDRKGSLQHCFTSVEEREGLWKERASRTERYRKQASNKIRSNRQMRNASSEEIETILDKRLSNSRNEYQKSEKVIRRYRVQDALLFLLAKKTLTELADFDGERFKLKEIMPDAEKGILSEIMPMSFTFEKGGKKYTITSEGMKLKNYGDFFVLASDKRIGNLLELVGSDIVSKEDIMEEFNKYDQCRPEISSIVFNLEKWAFDTYPELSARVDREEKVDFKSILKILLNNKNINKEQSDILRKIRNAFDANNYPDKGVVEIKALPEIAMSIKKAFGEYAIMK

SEQ ID NO: 92 - protein, 1385 aa, Artificial Sequence
  chemically synthesized
MDYKDHDGDYKDHDIDYKDDDDKGGMLLPVPLLLGLLGAAADGGNIPALVENQKKYFGTYSVMAMLNAQTVLDHIQKVADIEGEQNENNENLWFHPVMSHLYNAKNGYDKQPEKTMFIIERLQSYFPFLKIMAENQREYSNGKYKQNRVEVNSNDIFEVLKRAFGVLKMYRDLTNAYKTYEEKLNDGCEFLTSTEQPLSGMINNYYTVALRNMNERYGYKTEDLAFIQDKRFKFVKDAYGKKKSQVNTGFFLSLQDYNGDTQKKLHLSGVGIALLICLFLDKQYINIFLSRLPIFSSYNAQSEERRIIIRSFGINSIKLPKDRIHSEKSNKSVAMDMLNEVKRCPDELFTTLSAEKQSRFRIISDDHNEVLMKRSSDRFVPLLLQYIDYGKLFDHIRFHVNMGKLRYLLKADKTCIDGQTRVRVIEQPLNGFGRLEEAETMRKQENGTFGNSGIRIRDFENMKRDDANPANYPYIVDTYTHYILENNKVEMFINDKEDSAPLLPVIEDDRYVVKTIPSCRMSTLEIPAMAFHMFLFGSKKTEKLIVDVHNRYKRLFQAMQKEEVTAENIASFGIAESDLPQKILDLISGNAHGKDVDAFIRLTVDDMLTDTERRIKRFKDDRKSIRSADNKMGKRGFKQISTGKLADFLAKDIVLFQPSVNDGENKITGLNYRIMQSAIAVYDSGDDYEAKQQFKLMFEKARLIGKGTTEPHPFLYKVFARSIPANAVEFYERYLIERKFYLTGLSNEIKKGNRVDVPFIRRDQNKWKTPAMKTLGRIYSEDLPVELPRQMFDNEIKSHLKSLPQMEGIDFNNANVTYLIAEYMKRVLDDDFQTFYQWNRNYRYMDMLKGEYDRKGSLQHCFTSVEEREGLWKERASRTERYRKQASNKIRSNRQMRNASSEEIETILDKRLSNSRNEYQKSEKVIRRYRVQDALLFLLAKKTLTELADFDGERFKLKEIMPDAEKGILSEIMPMSFTFEKGGKKYTITSEGMKLKNYGDFFVLASDKRIGNLLELVGSDIVSKEDIMEEFNKYDQCRPEISSIVFNLEKWAFDTYPELSARVDREEKVDFKSILKILLNNKNINKEQSDILRKIRNAFDANNYPDKGVVEIKALPEIAMSIKKAFGEYAIMKSRGGGGSGGGGSTRVSKGEELFTGVVPILVELDGDVNGHKFSVSGEGEGDATYGKLTLKFICTTGKLPVPWPTLVTTLTYGVQCFSRYPDHMKQHDFFKSAMPEGYVQERTIFFKDDGNYKTRAEVKFEGDTLVNRIELKGIDFKEDGNILGHKLEYNYNSHNVYIMADKQKNGIKVNFKIRHNIEDGSVQLADHYQQNTPIGDGPVLLPDNHYLSTQSALSKDPNEKRDHMVLLEFVTAAGITLGMDELYK

SEQ ID NO: 93 - protein, 1377 aa, Artificial Sequence
  chemically synthesized
MDYKDHDGDYKDHDIDYKDDDDKGGGITLGKDELGGNIPALVENQKKYFGTYSVMAMLNAQTVLDHIQKVADIEGEQNENNENLWFHPVMSHLYNAKNGYDKQPEKTMFIIERLQSYFPFLKIMAENQREYSNGKYKQNRVEVNSNDIFEVLKRAFGVLKMYRDLTNAYKTYEEKLNDGCEFLTSTEQPLSGMINNYYTVALRNMNERYGYKTEDLAFIQDKRFKFVKDAYGKKKSQVNTGFFLSLQDYNGDTQKKLHLSGVGIALLICLFLDKQYINIFLSRLPIFSSYNAQSEERRIIIRSFGINSIKLPKDRIHSEKSNKSVAMDMLNEVKRCPDELFTTLSAEKQSRFRIISDDHNEVLMKRSSDRFVPLLLQYIDYGKLFDHIRFHVNMGKLRYLLKADKTCIDGQTRVRVIEQPLNGFGRLEEAETMRKQENGTFGNSGIRIRDFENMKRDDANPANYPYIVDTYTHYILENNKVEMFINDKEDSAPLLPVIEDDRYVVKTIPSCRMSTLEIPAMAFHMFLFGSKKTEKLIVDVHNRYKRLFQAMQKEEVTAENIASFGIAESDLPQKILDLISGNAHGKDVDAFIRLTVDDMLTDTERRIKRFKDDRKSIRSADNKMGKRGFKQISTGKLADFLAKDIVLFQPSVNDGENKITGLNYRIMQSAIAVYDSGDDYEAKQQFKLMFEKARLIGKGTTEPHPFLYKVFARSIPANAVEFYERYLIERKFYLTGLSNEIKKGNRVDVPFIRRDQNKWKTPAMKTLGRIYSEDLPVELPRQMFDNEIKSHLKSLPQMEGIDFNNANVTYLIAEYMKRVLDDDFQTFYQWNRNYRYMDMLKGEYDRKGSLQHCFTSVEEREGLWKERASRTERYRKQASNKIRSNRQMRNASSEEIETILDKRLSNSRNEYQKSEKVIRRYRVQDALLFLLAKKTLTELADFDGERFKLKEIMPDAEKGILSEIMPMSFTFEKGGKKYTITSEGMKLKNYGDFFVLASDKRIGNLLELVGSDIVSKEDIMEEFNKYDQCRPEISSIVFNLEKWAFDTYPELSARVDREEKVDFKSILKILLNNKNINKEQSDILRKIRNAFDANNYPDKGVVEIKALPEIAMSIKKAFGEYAIMKSRGGGGSGGGGSTRVSKGEELFTGVVPILVELDGDVNGHKFSVSGEGEGDATYGKLTLKFICTTGKLPVPWPTLVTTLTYGVQCFSRYPDHMKQHDFFKSAMPEGYVQERTIFFKDDGNYKTRAEVKFEGDTLVNRIELKGIDFKEDGNILGHKLEYNYNSHNVYIMADKQKNGIKVNFKIRHNIEDGSVQLADHYQQNTPIGDGPVLLPDNHYLSTQSALSKDPNEKRDHMVLLEFVTAAGITLGMDELYK

SEQ ID NO: 94 - protein, 1371 aa, Artificial Sequence
  chemically synthesized
MDYKDHDGDYKDHDIDYKDDDDKGGSKLGGNIPALVENQKKYFGTYSVMAMLNAQTVLDHIQKVADIEGEQNENNENLWFHPVMSHLYNAKNGYDKQPEKTMFIIERLQSYFPFLKIMAENQREYSNGKYKQNRVEVNSNDIFEVLKRAFGVLKMYRDLTNAYKTYEEKLNDGCEFLTSTEQPLSGMINNYYTVALRNMNERYGYKTEDLAFIQDKRFKFVKDAYGKKKSQVNTGFFLSLQDYNGDTQKKLHLSGVGIALLICLFLDKQYINIFLSRLPIFSSYNAQSEERRIIIRSFGINSIKLPKDRIHSEKSNKSVAMDMLNEVKRCPDELFTTLSAEKQSRFRIISDDHNEVLMKRSSDRFVPLLLQYIDYGKLFDHIRFHVNMGKLRYLLKADKTCIDGQTRVRVIEQPLNGFGRLEEAETMRKQENGTFGNSGIRIRDFENMKRDDANPANYPYIVDTYTHYILENNKVEMFINDKEDSAPLLPVIEDDRYVVKTIPSCRMSTLEIPAMAFHMFLFGSKKTEKLIVDVHNRYKRLFQAMQKEEVTAENIASFGIAESDLPQKILDLISGNAHGKDVDAFIRLTVDDMLTDTERRIKRFKDDRKSIRSADNKMGKRGFKQISTGKLADFLAKDIVLFQPSVNDGENKITGLNYRIMQSAIAVYDSGDDYEAKQQFKLMFEKARLIGKGTTEPHPFLYKVFARSIPANAVEFYERYLIERKFYLTGLSNEIKKGNRVDVPFIRRDQNKWKTPAMKTLGRIYSEDLPVELPRQMFDNEIKSHLKSLPQMEGIDFNNANVTYLIAEYMKRVLDDDFQTFYQWNRNYRYMDMLKGEYDRKGSLQHCFTSVEEREGLWKERASRTERYRKQASNKIRSNRQMRNASSEEIETILDKRLSNSRNEYQKSEKVIRRYRVQDALLFLLAKKTLTELADFDGERFKLKEIMPDAEKGILSEIMPMSFTFEKGGKKYTITSEGMKLKNYGDFFVLASDKRIGNLLELVGSDIVSKEDIMEEFNKYDQCRPEISSIVFNLEKWAFDTYPELSARVDREEKVDFKSILKILLNNKNINKEQSDILRKIRNAFDANNYPDKGVVEIKALPEIAMSIKKAFGEYAIMKSRGGGGSGGGGSTRVSKGEELFTGVVPILVELDGDVNGHKFSVSGEGEGDATYGKLTLKFICTTGKLPVPWPTLVTTLTYGVQCFSRYPDHMKQHDFFKSAMPEGYVQERTIFFKDDGNYKTRAEVKFEGDTLVNRIELKGIDFKEDGNILGHKLEYNYNSHNVYIMADKQKNGIKVNFKIRHNIEDGSVQLADHYQQNTPIGDGPVLLPDNHYLSTQSALSKDPNEKRDHMVLLEFVTAAGITLGMDELYK

SEQ ID NO: 95 - protein, 1300 aa, Artificial Sequence
  chemically synthesized
MDYKDHDGDYKDHDIDYKDDDDKGGNSKKRSLEDNETEIKVSRDTWNTKNMRSLEPPRSKKRIHGGNIPALVENQKKYFGTYSVMAMLNAQTVLDHIQKVADIEGEQNENNENLWFHPVMSHLYNAKNGYDKQPEKTMFIIERLQSYFPFLKIMAENQREYSNGKYKQNRVEVNSNDIFEVLKRAFGVLKMYRDLTNAYKTYEEKLNDGCEFLTSTEQPLSGMINNYYTVALRNMNERYGYKTEDLAFIQDKRFKFVKDAYGKKKSQVNTGFFLSLQDYNGDTQKKLHLSGVGIALLICLFLDKQYINIFLSRLPIFSSYNAQSEERRIIIRSFGINSIKLPKDRIHSEKSNKSVAMDMLNEVKRCPDELFTTLSAEKQSRFRIISDDHNEVLMKRSSDRFVPLLLQYIDYGKLFDHIRFHVNMGKLRYLLKADKTCIDGQTRVRVIEQPLNGFGRLEEAETMRKQENGTFGNSGIRIRDFENMKRDDANPANYPYIVDTYTHYILENNKVEMFINDKEDSAPLLPVIEDDRYVVKTIPSCRMSTLEIPAMAFHMFLFGSKKTEKLIVDVHNRYKRLFQAMQKEEVTAENIASFGIAESDLPQKILDLISGNAHGKDVDAFIRLTVDDMLTDTERRIKRFKDDRKSIRSADNKMGKRGFKQISTGKLADFLAKDIVLFQPSVNDGENKITGLNYRIMQSAIAVYDSGDDYEAKQQFKLMFEKARLIGKGTTEPHPFLYKVFARSIPANAVEFYERYLIERKFYLTGLSNEIKKGNRVDVPFIRRDQNKWKTPAMKTLGRIYSEDLPVELPRQMFDNEIKSHLKSLPQMEGIDFNNANVTYLIAEYMKRVLDDDFQTFYQWNRNYRYMDMLKGEYDRKGSLQHCFTSVEEREGLWKERASRTERYRKQASNKIRSNRQMRNASSEEIETILDKRLSNSRNEYQKSEKVIRRYRVQDALLFLLAKKTLTELADFDGERFKLKEIMPDAEKGILSEIMPMSFTFEKGGKKYTITSEGMKLKNYGDFFVLASDKRIGNLLELVGSDIVSKEDSRGGGGSGGGGSTRVSKGEELFTGVVPILVELDGDVNGHKFSVSGEGEGDATYGKLTLKFICTTGKLPVPWPTLVTTLTYGVQCFSRYPDHMKQHDFFKSAMPEGYVQERTIFFKDDGNYKTRAEVKFEGDTLVNRIELKGIDFKEDGNILGHKLEYNYNSHNVYIMADKQKNGIKVNFKIRHNIEDGSVQLADHYQQNTPIGDGPVLLPDNHYLSTQSALSKDPNEKRDHMVLLEFVTAAGITLGMDELYK

SEQ ID NO: 96 - protein, 1300 aa, Artificial Sequence
  chemically synthesized
MDYKDHDGDYKDHDIDYKDDDDKGGKSKKRSLEDNETEIEVSRDTWNNKNMRSLEPPRSKKRINGGNIPALVENQKKYFGTYSVMAMLNAQTVLDHIQKVADIEGEQNENNENLWFHPVMSHLYNAKNGYDKQPEKTMFIIERLQSYFPFLKIMAENQREYSNGKYKQNRVEVNSNDIFEVLKRAFGVLKMYRDLTNAYKTYEEKLNDGCEFLTSTEQPLSGMINNYYTVALRNMNERYGYKTEDLAFIQDKRFKFVKDAYGKKKSQVNTGFFLSLQDYNGDTQKKLHLSGVGIALLICLFLDKQYINIFLSRLPIFSSYNAQSEERRIIIRSFGINSIKLPKDRIHSEKSNKSVAMDMLNEVKRCPDELFTTLSAEKQSRFRIISDDHNEVLMKRSSDRFVPLLLQYIDYGKLFDHIRFHVNMGKLRYLLKADKTCIDGQTRVRVIEQPLNGFGRLEEAETMRKQENGTFGNSGIRIRDFENMKRDDANPANYPYIVDTYTHYILENNKVEMFINDKEDSAPLLPVIEDDRYVVKTIPSCRMSTLEIPAMAFHMFLFGSKKTEKLIVDVHNRYKRLFQAMQKEEVTAENIASFGIAESDLPQKILDLISGNAHGKDVDAFIRLTVDDMLTDTERRIKRFKDDRKSIRSADNKMGKRGFKQISTGKLADFLAKDIVLFQPSVNDGENKITGLNYRIMQSAIAVYDSGDDYEAKQQFKLMFEKARLIGKGTTEPHPFLYKVFARSIPANAVEFYERYLIERKFYLTGLSNEIKKGNRVDVPFIRRDQNKWKTPAMKTLGRIYSEDLPVELPRQMFDNEIKSHLKSLPQMEGIDFNNANVTYLIAEYMKRVLDDDFQTFYQWNRNYRYMDMLKGEYDRKGSLQHCFTSVEEREGLWKERASRTERYRKQASNKIRSNRQMRNASSEEIETILDKRLSNSRNEYQKSEKVIRRYRVQDALLFLLAKKTLTELADFDGERFKLKEIMPDAEKGILSEIMPMSFTFEKGGKKYTITSEGMKLKNYGDFFVLASDKRIGNLLELVGSDIVSKEDSRGGGGSGGGGSTRVSKGEELFTGVVPILVELDGDVNGHKFSVSGEGEGDATYGKLTLKFICTTGKLPVPWPTLVTTLTYGVQCFSRYPDHMKQHDFFKSAMPEGYVQERTIFFKDDGNYKTRAEVKFEGDTLVNRIELKGIDFKEDGNILGHKLEYNYNSHNVYIMADKQKNGIKVNFKIRHNIEDGSVQLADHYQQNTPIGDGPVLLPDNHYLSTQSALSKDPNEKRDHMVLLEFVTAAGITLGMDELYK

SEQ ID NO: 97 - protein, 1272 aa, Artificial Sequence
  chemically synthesized
MDYKDHDGDYKDHDIDYKDDDDKGGLQLPPLERLTLGGNIPALVENQKKYFGTYSVMAMLNAQTVLDHIQKVADIEGEQNENNENLWFHPVMSHLYNAKNGYDKQPEKTMFIIERLQSYFPFLKIMAENQREYSNGKYKQNRVEVNSNDIFEVLKRAFGVLKMYRDLTNAYKTYEEKLNDGCEFLTSTEQPLSGMINNYYTVALRNMNERYGYKTEDLAFIQDKRFKFVKDAYGKKKSQVNTGFFLSLQDYNGDTQKKLHLSGVGIALLICLFLDKQYINIFLSRLPIFSSYNAQSEERRIIIRSFGINSIKLPKDRIHSEKSNKSVAMDMLNEVKRCPDELFTTLSAEKQSRFRIISDDHNEVLMKRSSDRFVPLLLQYIDYGKLFDHIRFHVNMGKLRYLLKADKTCIDGQTRVRVIEQPLNGFGRLEEAETMRKQENGTFGNSGIRIRDFENMKRDDANPANYPYIVDTYTHYILENNKVEMFINDKEDSAPLLPVIEDDRYVVKTIPSCRMSTLEIPAMAFHMFLFGSKKTEKLIVDVHNRYKRLFQAMQKEEVTAENIASFGIAESDLPQKILDLISGNAHGKDVDAFIRLTVDDMLTDTERRIKRFKDDRKSIRSADNKMGKRGFKQISTGKLADFLAKDIVLFQPSVNDGENKITGLNYRIMQSAIAVYDSGDDYEAKQQFKLMFEKARLIGKGTTEPHPFLYKVFARSIPANAVEFYERYLIERKFYLTGLSNEIKKGNRVDVPFIRRDQNKWKTPAMKTLGRIYSEDLPVELPRQMFDNEIKSHLKSLPQMEGIDFNNANVTYLIAEYMKRVLDDDFQTFYQWNRNYRYMDMLKGEYDRKGSLQHCFTSVEEREGLWKERASRTERYRKQASNKIRSNRQMRNASSEEIETILDKRLSNSRNEYQKSEKVIRRYRVQDALLFLLAKKTLTELADFDGERFKLKEIMPDAEKGILSEIMPMSFTFEKGGKKYTITSEGMKLKNYGDFFVLASDKRIGNLLELVGSDIVSKEDSRGGGGSGGGGSTRVSKGEELFTGVVPILVELDGDVNGHKFSVSGEGEGDATYGKLTLKFICTTGKLPVPWPTLVTTLTYGVQCFSRYPDHMKQHDFFKSAMPEGYVQERTIFFKDDGNYKTRAEVKFEGDTLVNRIELKGIDFKEDGNILGHKLEYNYNSHNVYIMADKQKNGIKVNFKIRHNIEDGSVQLADHYQQNTPIGDGPVLLPDNHYLSTQSALSKDPNEKRDHMVLLEFVTAAGITLGMDELYK

SEQ ID NO: 98 - protein, 1277 aa, Artificial Sequence
  chemically synthesized
MDYKDHDGDYKDHDIDYKDDDDKGGGSLQLPPLERLTLGSSGGNIPALVENQKKYFGTYSVMAMLNAQTVLDHIQKVADIEGEQNENNENLWFHPVMSHLYNAKNGYDKQPEKTMFIIERLQSYFPFLKIMAENQREYSNGKYKQNRVEVNSNDIFEVLKRAFGVLKMYRDLTNAYKTYEEKLNDGCEFLTSTEQPLSGMINNYYTVALRNMNERYGYKTEDLAFIQDKRFKFVKDAYGKKKSQVNTGFFLSLQDYNGDTQKKLHLSGVGIALLICLFLDKQYINIFLSRLPIFSSYNAQSEERRIIIRSFGINSIKLPKDRIHSEKSNKSVAMDMLNEVKRCPDELFTTLSAEKQSRFRIISDDHNEVLMKRSSDRFVPLLLQYIDYGKLFDHIRFHVNMGKLRYLLKADKTCIDGQTRVRVIEQPLNGFGRLEEAETMRKQENGTFGNSGIRIRDFENMKRDDANPANYPYIVDTYTHYILENNKVEMFINDKEDSAPLLPVIEDDRYVVKTIPSCRMSTLEIPAMAFHMFLFGSKKTEKLIVDVHNRYKRLFQAMQKEEVTAENIASFGIAESDLPQKILDLISGNAHGKDVDAFIRLTVDDMLTDTERRIKRFKDDRKSIRSADNKMGKRGFKQISTGKLADFLAKDIVLFQPSVNDGENKITGLNYRIMQSAIAVYDSGDDYEAKQQFKLMFEKARLIGKGTTEPHPFLYKVFARSIPANAVEFYERYLIERKFYLTGLSNEIKKGNRVDVPFIRRDQNKWKTPAMKTLGRIYSEDLPVELPRQMFDNEIKSHLKSLPQMEGIDFNNANVTYLIAEYMKRVLDDDFQTFYQWNRNYRYMDMLKGEYDRKGSLQHCFTSVEEREGLWKERASRTERYRKQASNKIRSNRQMRNASSEEIETILDKRLSNSRNEYQKSEKVIRRYRVQDALLFLLAKKTLTELADFDGERFKLKEIMPDAEKGILSEIMPMSFTFEKGGKKYTITSEGMKLKNYGDFFVLASDKRIGNLLELVGSDIVSKEDSRGGGGSGGGGSTRVSKGEELFTGVVPILVELDGDVNGHKFSVSGEGEGDATYGKLTLKFICTTGKLPVPWPTLVTTLTYGVQCFSRYPDHMKQHDFFKSAMPEGYVQERTIFFKDDGNYKTRAEVKFEGDTLVNRIELKGIDFKEDGNILGHKLEYNYNSHNVYIMADKQKNGIKVNFKIRHNIEDGSVQLADHYQQNTPIGDGPVLLPDNHYLSTQSALSKDPNEKRDHMVLLEFVTAAGITLGMDELYK

SEQ ID NO: 99 - protein, 1293 aa, Artificial Sequence
  chemically synthesized
MDYKDHDGDYKDHDIDYKDDDDKGGMSVLTPLLLRGLTGSARRLPVPRAKIHSLGDPGGNIPALVENQKKYFGTYSVMAMLNAQTVLDHIQKVADIEGEQNENNENLWFHPVMSHLYNAKNGYDKQPEKTMFIIERLQSYFPFLKIMAENQREYSNGKYKQNRVEVNSNDIFEVLKRAFGVLKMYRDLTNAYKTYEEKLNDGCEFLTSTEQPLSGMINNYYTVALRNMNERYGYKTEDLAFIQDKRFKFVKDAYGKKKSQVNTGFFLSLQDYNGDTQKKLHLSGVGIALLICLFLDKQYINIFLSRLPIFSSYNAQSEERRIIIRSFGINSIKLPKDRIHSEKSNKSVAMDMLNEVKRCPDELFTTLSAEKQSRFRIISDDHNEVLMKRSSDRFVPLLLQYIDYGKLFDHIRFHVNMGKLRYLLKADKTCIDGQTRVRVIEQPLNGFGRLEEAETMRKQENGTFGNSGIRIRDFENMKRDDANPANYPYIVDTYTHYILENNKVEMFINDKEDSAPLLPVIEDDRYVVKTIPSCRMSTLEIPAMAFHMFLFGSKKTEKLIVDVHNRYKRLFQAMQKEEVTAENIASFGIAESDLPQKILDLISGNAHGKDVDAFIRLTVDDMLTDTERRIKRFKDDRKSIRSADNKMGKRGFKQISTGKLADFLAKDIVLFQPSVNDGENKITGLNYRIMQSAIAVYDSGDDYEAKQQFKLMFEKARLIGKGTTEPHPFLYKVFARSIPANAVEFYERYLIERKFYLTGLSNEIKKGNRVDVPFIRRDQNKWKTPAMKTLGRIYSEDLPVELPRQMFDNEIKSHLKSLPQMEGIDFNNANVTYLIAEYMKRVLDDDFQTFYQWNRNYRYMDMLKGEYDRKGSLQHCFTSVEEREGLWKERASRTERYRKQASNKIRSNRQMRNASSEEIETILDKRLSNSRNEYQKSEKVIRRYRVQDALLFLLAKKTLTELADFDGERFKLKEIMPDAEKGILSEIMPMSFTFEKGGKKYTITSEGMKLKNYGDFFVLASDKRIGNLLELVGSDIVSKEDSRGGGGSGGGGSTRVSKGEELFTGVVPILVELDGDVNGHKFSVSGEGEGDATYGKLTLKFICTTGKLPVPWPTLVTTLTYGVQCFSRYPDHMKQHDFFKSAMPEGYVQERTIFFKDDGNYKTRAEVKFEGDTLVNRIELKGIDFKEDGNILGHKLEYNYNSHNVYIMADKQKNGIKVNFKIRHNIEDGSVQLADHYQQNTPIGDGPVLLPDNHYLSTQSALSKDPNEKRDHMVLLEFVTAAGITLGMDELYK

SEQ ID NO: 100 - protein, 1391 aa, Artificial Sequence
  chemically synthesized
MDYKDHDGDYKDHDIDYKDDDDKGGMSVLTPLLLRGLTGSARRLPVPRAKIHSLGDPMSVLTPLLLRGLTGSARRLPVPRAKIHSLGKLATMSVLTPLLLRGLTGSARRLPVPRAKIHSLGDPMSVLTPLLLRGLTGSARRLPVPRAKIHSLGKLGGNIPALVENQKKYFGTYSVMAMLNAQTVLDHIQKVADIEGEQNENNENLWFHPVMSHLYNAKNGYDKQPEKTMFIIERLQSYFPFLKIMAENQREYSNGKYKQNRVEVNSNDIFEVLKRAFGVLKMYRDLTNAYKTYEEKLNDGCEFLTSTEQPLSGMINNYYTVALRNMNERYGYKTEDLAFIQDKRFKFVKDAYGKKKSQVNTGFFLSLQDYNGDTQKKLHLSGVGIALLICLFLDKQYINIFLSRLPIFSSYNAQSEERRIIIRSFGINSIKLPKDRIHSEKSNKSVAMDMLNEVKRCPDELFTTLSAEKQSRFRIISDDHNEVLMKRSSDRFVPLLLQYIDYGKLFDHIRFHVNMGKLRYLLKADKTCIDGQTRVRVIEQPLNGFGRLEEAETMRKQENGTFGNSGIRIRDFENMKRDDANPANYPYIVDTYTHYILENNKVEMFINDKEDSAPLLPVIEDDRYVVKTIPSCRMSTLEIPAMAFHMFLFGSKKTEKLIVDVHNRYKRLFQAMQKEEVTAENIASFGIAESDLPQKILDLISGNAHGKDVDAFIRLTVDDMLTDTERRIKRFKDDRKSIRSADNKMGKRGFKQISTGKLADFLAKDIVLFQPSVNDGENKITGLNYRIMQSAIAVYDSGDDYEAKQQFKLMFEKARLIGKGTTEPHPFLYKVFARSIPANAVEFYERYLIERKFYLTGLSNEIKKGNRVDVPFIRRDQNKWKTPAMKTLGRIYSEDLPVELPRQMFDNEIKSHLKSLPQMEGIDFNNANVTYLIAEYMKRVLDDDFQTFYQWNRNYRYMDMLKGEYDRKGSLQHCFTSVEEREGLWKERASRTERYRKQASNKIRSNRQMRNASSEEIETILDKRLSNSRNEYQKSEKVIRRYRVQDALLFLLAKKTLTELADFDGERFKLKEIMPDAEKGILSEIMPMSFTFEKGGKKYTITSEGMKLKNYGDFFVLASDKRIGNLLELVGSDIVSKEDSRGGGGSGGGGSTRVSKGEELFTGVVPILVELDGDVNGHKFSVSGEGEGDATYGKLTLKFICTTGKLPVPWPTLVTTLTYGVQCFSRYPDHMKQHDFFKSAMPEGYVQERTIFFKDDGNYKTRAEVKFEGDTLVNRIELKGIDFKEDGNILGHKLEYNYNSHNVYIMADKQKNGIKVNFKIRHNIEDGSVQLADHYQQNTPIGDGPVLLPDNHYLSTQSALSKDPNEKRDHMVLLEFVTAAGITLGMDELYK

SEQ ID NO: 101 - protein, 1282 aa, Artificial Sequence
  chemically synthesized
MDYKDHDGDYKDHDIDYKDDDDKGGMYRMQLLSCIALSLALVTNSLGGNIPALVENQKKYFGTYSVMAMLNAQTVLDHIQKVADIEGEQNENNENLWFHPVMSHLYNAKNGYDKQPEKTMFIIERLQSYFPFLKIMAENQREYSNGKYKQNRVEVNSNDIFEVLKRAFGVLKMYRDLTNAYKTYEEKLNDGCEFLTSTEQPLSGMINNYYTVALRNMNERYGYKTEDLAFIQDKRFKFVKDAYGKKKSQVNTGFFLSLQDYNGDTQKKLHLSGVGIALLICLFLDKQYINIFLSRLPIFSSYNAQSEERRIIIRSFGINSIKLPKDRIHSEKSNKSVAMDMLNEVKRCPDELFTTLSAEKQSRFRIISDDHNEVLMKRSSDRFVPLLLQYIDYGKLFDHIRFHVNMGKLRYLLKADKTCIDGQTRVRVIEQPLNGFGRLEEAETMRKQENGTFGNSGIRIRDFENMKRDDANPANYPYIVDTYTHYILENNKVEMFINDKEDSAPLLPVIEDDRYVVKTIPSCRMSTLEIPAMAFHMFLFGSKKTEKLIVDVHNRYKRLFQAMQKEEVTAENIASFGIAESDLPQKILDLISGNAHGKDVDAFIRLTVDDMLTDTERRIKRFKDDRKSIRSADNKMGKRGFKQISTGKLADFLAKDIVLFQPSVNDGENKITGLNYRIMQSAIAVYDSGDDYEAKQQFKLMFEKARLIGKGTTEPHPFLYKVFARSIPANAVEFYERYLIERKFYLTGLSNEIKKGNRVDVPFIRRDQNKWKTPAMKTLGRIYSEDLPVELPRQMFDNEIKSHLKSLPQMEGIDFNNANVTYLIAEYMKRVLDDDFQTFYQWNRNYRYMDMLKGEYDRKGSLQHCFTSVEEREGLWKERASRTERYRKQASNKIRSNRQMRNASSEEIETILDKRLSNSRNEYQKSEKVIRRYRVQDALLFLLAKKTLTELADFDGERFKLKEIMPDAEKGILSEIMPMSFTFEKGGKKYTITSEGMKLKNYGDFFVLASDKRIGNLLELVGSDIVSKEDSRGGGGSGGGGSTRVSKGEELFTGVVPILVELDGDVNGHKFSVSGEGEGDATYGKLTLKFICTTGKLPVPWPTLVTTLTYGVQCFSRYPDHMKQHDFFKSAMPEGYVQERTIFFKDDGNYKTRAEVKFEGDTLVNRIELKGIDFKEDGNILGHKLEYNYNSHNVYIMADKQKNGIKVNFKIRHNIEDGSVQLADHYQQNTPIGDGPVLLPDNHYLSTQSALSKDPNEKRDHMVLLEFVTAAGITLGMDELYK

SEQ ID NO: 102 - protein, 1052 aa, Artificial Sequence
  chemically synthesized
MDYKDHDGDYKDHDIDYKDDDDKGGMGCCFSKTAAKGEAAAERPGEAAVASSPSKANGQENGHVKVGSGGNIPALVENQKKYFGTYSVMAMLNAQTVLDHIQKVADIEGEQNENNENLWFHPVMSHLYNAKNGYDKQPEKTMFIIERLQSYFPFLKIMAENQREYSNGKYKQNRVEVNSNDIFEVLKRAFGVLKMYRDLTNAYKTYEEKLNDGCEFLTSTEQPLSGMINNYYTVALRNMNERYGYKTEDLAFIQDKRFKFVKDAYGKKKSQVNTGFFLSLQDYNGDTQKKLHLSGVGIALLICLFLDKQYINIFLSRLPIFSSYNAQSEERRIIIRSFGINSIKLPKDRIHSEKSNKSVAMDMLNEVKRCPDELFTTLSAEKQSRFRIISDDHNEVLMKRSSDRFVPLLLQYIDYGKLFDHIRFHVNMGKLRYLLKADKTCIDGQTRVRVIEQPLNGFGRLEEAETMRKQENGTFGNSGIRIRDFENMKRDDANPANYPYIVDTYTHYILENNKVEMFINDKEDSAPLLPVIEDDRYVVKTIPSCRMSTLEIPAMAFHMFLFGSKKTEKLIVDVHNRYKRLFQAMQKEEVTAENIASFGIAESDLPQKILDLISGNAHGKDVDAFIRLTVDDMLTDTERRIKRFKDDRKSIRSADNKMGKRGFKQISTGKLADFLAKDIVLFQPSVNDGENKITGLNYRIMQSAIAVYDSGDDYEAKQQFKLMFEKARLIGKGTTEPHPFLYKVFARSIPANAVEFYERYLIERKFYLTGLSNEIKKGNRVDVPFIRRDQNKWKTPAMKTLGRIYSEDLPVELPRQMFDNEIKSHLKSLPQMEGIDFNNANVTYLIAEYMKRVLDDDFQTFYQWNRNYRYMDMLKGEYDRKGSLQHCFTSVEEREGLWKERASRTERYRKQASNKIRSNRQMRNASSEEIETILDKRLSNSRNEYQKSEKVIRRYRVQDALLFLLAKKTLTELADFDGERFKLKEIMPDAEKGILSEIMPMSFTFEKGGKKYTITSEGMKLKNYGDFFVLASDKRIGNLLELVGSDIVSKED

SEQ ID NO: 103 - protein, 1278 aa, Artificial Sequence
  chemically synthesized
MDYKDHDGDYKDHDIDYKDDDDKGGMLLPVPLLLGLLGAAADGGNIPALVENQKKYFGTYSVMAMLNAQTVLDHIQKVADIEGEQNENNENLWFHPVMSHLYNAKNGYDKQPEKTMFIIERLQSYFPFLKIMAENQREYSNGKYKQNRVEVNSNDIFEVLKRAFGVLKMYRDLTNAYKTYEEKLNDGCEFLTSTEQPLSGMINNYYTVALRNMNERYGYKTEDLAFIQDKRFKFVKDAYGKKKSQVNTGFFLSLQDYNGDTQKKLHLSGVGIALLICLFLDKQYINIFLSRLPIFSSYNAQSEERRIIIRSFGINSIKLPKDRIHSEKSNKSVAMDMLNEVKRCPDELFTTLSAEKQSRFRIISDDHNEVLMKRSSDRFVPLLLQYIDYGKLFDHIRFHVNMGKLRYLLKADKTCIDGQTRVRVIEQPLNGFGRLEEAETMRKQENGTFGNSGIRIRDFENMKRDDANPANYPYIVDTYTHYILENNKVEMFINDKEDSAPLLPVIEDDRYVVKTIPSCRMSTLEIPAMAFHMFLFGSKKTEKLIVDVHNRYKRLFQAMQKEEVTAENIASFGIAESDLPQKILDLISGNAHGKDVDAFIRLTVDDMLTDTERRIKRFKDDRKSIRSADNKMGKRGFKQISTGKLADFLAKDIVLFQPSVNDGENKITGLNYRIMQSAIAVYDSGDDYEAKQQFKLMFEKARLIGKGTTEPHPFLYKVFARSIPANAVEFYERYLIERKFYLTGLSNEIKKGNRVDVPFIRRDQNKWKTPAMKTLGRIYSEDLPVELPRQMFDNEIKSHLKSLPQMEGIDFNNANVTYLIAEYMKRVLDDDFQTFYQWNRNYRYMDMLKGEYDRKGSLQHCFTSVEEREGLWKERASRTERYRKQASNKIRSNRQMRNASSEEIETILDKRLSNSRNEYQKSEKVIRRYRVQDALLFLLAKKTLTELADFDGERFKLKEIMPDAEKGILSEIMPMSFTFEKGGKKYTITSEGMKLKNYGDFFVLASDKRIGNLLELVGSDIVSKEDSRGGGGSGGGGSTRVSKGEELFTGVVPILVELDGDVNGHKFSVSGEGEGDATYGKLTLKFICTTGKLPVPWPTLVTTLTYGVQCFSRYPDHMKQHDFFKSAMPEGYVQERTIFFKDDGNYKTRAEVKFEGDTLVNRIELKGIDFKEDGNILGHKLEYNYNSHNVYIMADKQKNGIKVNFKIRHNIEDGSVQLADHYQQNTPIGDGPVLLPDNHYLSTQSALSKDPNEKRDHMVLLEFVTAAGITLGMDELYK

SEQ ID NO: 104 - protein, 1270 aa, Artificial Sequence
  chemically synthesized
MDYKDHDGDYKDHDIDYKDDDDKGGGITLGKDELGGNIPALVENQKKYFGTYSVMAMLNAQTVLDHIQKVADIEGEQNENNENLWFHPVMSHLYNAKNGYDKQPEKTMFIIERLQSYFPFLKIMAENQREYSNGKYKQNRVEVNSNDIFEVLKRAFGVLKMYRDLTNAYKTYEEKLNDGCEFLTSTEQPLSGMINNYYTVALRNMNERYGYKTEDLAFIQDKRFKFVKDAYGKKKSQVNTGFFLSLQDYNGDTQKKLHLSGVGIALLICLFLDKQYINIFLSRLPIFSSYNAQSEERRIIIRSFGINSIKLPKDRIHSEKSNKSVAMDMLNEVKRCPDELFTTLSAEKQSRFRIISDDHNEVLMKRSSDRFVPLLLQYIDYGKLFDHIRFHVNMGKLRYLLKADKTCIDGQTRVRVIEQPLNGFGRLEEAETMRKQENGTFGNSGIRIRDFENMKRDDANPANYPYIVDTYTHYILENNKVEMFINDKEDSAPLLPVIEDDRYVVKTIPSCRMSTLEIPAMAFHMFLFGSKKTEKLIVDVHNRYKRLFQAMQKEEVTAENIASFGIAESDLPQKILDLISGNAHGKDVDAFIRLTVDDMLTDTERRIKRFKDDRKSIRSADNKMGKRGFKQISTGKLADFLAKDIVLFQPSVNDGENKITGLNYRIMQSAIAVYDSGDDYEAKQQFKLMFEKARLIGKGTTEPHPFLYKVFARSIPANAVEFYERYLIERKFYLTGLSNEIKKGNRVDVPFIRRDQNKWKTPAMKTLGRIYSEDLPVELPRQMFDNEIKSHLKSLPQMEGIDFNNANVTYLIAEYMKRVLDDDFQTFYQWNRNYRYMDMLKGEYDRKGSLQHCFTSVEEREGLWKERASRTERYRKQASNKIRSNRQMRNASSEEIETILDKRLSNSRNEYQKSEKVIRRYRVQDALLFLLAKKTLTELADFDGERFKLKEIMPDAEKGILSEIMPMSFTFEKGGKKYTITSEGMKLKNYGDFFVLASDKRIGNLLELVGSDIVSKEDSRGGGGSGGGGSTRVSKGEELFTGVVPILVELDGDVNGHKFSVSGEGEGDATYGKLTLKFICTTGKLPVPWPTLVTTLTYGVQCFSRYPDHMKQHDFFKSAMPEGYVQERTIFFKDDGNYKTRAEVKFEGDTLVNRIELKGIDFKEDGNILGHKLEYNYNSHNVYIMADKQKNGIKVNFKIRHNIEDGSVQLADHYQQNTPIGDGPVLLPDNHYLSTQSALSKDPNEKRDHMVLLEFVTAAGITLGMDELYK

SEQ ID NO: 105 - protein, 1264 aa, Artificial Sequence
  chemically synthesized
MDYKDHDGDYKDHDIDYKDDDDKGGSKLGGNIPALVENQKKYFGTYSVMAMLNAQTVLDHIQKVADIEGEQNENNENLWFHPVMSHLYNAKNGYDKQPEKTMFIIERLQSYFPFLKIMAENQREYSNGKYKQNRVEVNSNDIFEVLKRAFGVLKMYRDLTNAYKTYEEKLNDGCEFLTSTEQPLSGMINNYYTVALRNMNERYGYKTEDLAFIQDKRFKFVKDAYGKKKSQVNTGFFLSLQDYNGDTQKKLHLSGVGIALLICLFLDKQYINIFLSRLPIFSSYNAQSEERRIIIRSFGINSIKLPKDRIHSEKSNKSVAMDMLNEVKRCPDELFTTLSAEKQSRFRIISDDHNEVLMKRSSDRFVPLLLQYIDYGKLFDHIRFHVNMGKLRYLLKADKTCIDGQTRVRVIEQPLNGFGRLEEAETMRKQENGTFGNSGIRIRDFENMKRDDANPANYPYIVDTYTHYILENNKVEMFINDKEDSAPLLPVIEDDRYVVKTIPSCRMSTLEIPAMAFHMFLFGSKKTEKLIVDVHNRYKRLFQAMQKEEVTAENIASFGIAESDLPQKILDLISGNAHGKDVDAFIRLTVDDMLTDTERRIKRFKDDRKSIRSADNKMGKRGFKQISTGKLADFLAKDIVLFQPSVNDGENKITGLNYRIMQSAIAVYDSGDDYEAKQQFKLMFEKARLIGKGTTEPHPFLYKVFARSIPANAVEFYERYLIERKFYLTGLSNEIKKGNRVDVPFIRRDQNKWKTPAMKTLGRIYSEDLPVELPRQMFDNEIKSHLKSLPQMEGIDFNNANVTYLIAEYMKRVLDDDFQTFYQWNRNYRYMDMLKGEYDRKGSLQHCFTSVEEREGLWKERASRTERYRKQASNKIRSNRQMRNASSEEIETILDKRLSNSRNEYQKSEKVIRRYRVQDALLFLLAKKTLTELADFDGERFKLKEIMPDAEKGILSEIMPMSFTFEKGGKKYTITSEGMKLKNYGDFFVLASDKRIGNLLELVGSDIVSKEDSRGGGGSGGGGSTRVSKGEELFTGVVPILVELDGDVNGHKFSVSGEGEGDATYGKLTLKFICTTGKLPVPWPTLVTTLTYGVQCFSRYPDHMKQHDFFKSAMPEGYVQERTIFFKDDGNYKTRAEVKFEGDTLVNRIELKGIDFKEDGNILGHKLEYNYNSHNVYIMADKQKNGIKVNFKIRHNIEDGSVQLADHYQQNTPIGDGPVLLPDNHYLSTQSALSKDPNEKRDHMVLLEFVTAAGITLGMDELYK

SEQ ID NO: 106 - protein, 1404 aa, Artificial Sequence
  chemically synthesized
MDYKDHDGDYKDHDIDYKDDDDKGGNSKKRSLEDNETEIKVSRDTWNTKNMRSLEPPRSKKRIHGGNIPALVENQKKYFGTYSVMAMLNAQTVLDHIQKVADIEGEQNENNENLWFHPVMSHLYNAKNGYDKQPEKTMFIIERLQSYFPFLKIMAENQREYSNGKYKQNRVEVNSNDIFEVLKRAFGVLKMYRDLTNAYKTYEEKLNDGCEFLTSTEQPLSGMINNYYTVALRNMNERYGYKTEDLAFIQDKRFKFVKDAYGKKKSQVNTGFFLSLQDYNGDTQKKLHLSGVGIALLICLFLDKQYINIFLSRLPIFSSYNAQSEERRIIIRSFGINSIKLPKDRIHSEKSNKSVAMDMLNEVKRCPDELFTTLSAEKQSRFRIISDDHNEVLMKRSSDRFVPLLLQYIDYGKLFDHIRFHVNMGKLRYLLKADKTCIDGQTRVRVIEQPLNGFGRLEEAETMRKQENGTFGNSGIRIRDFENMKRDDANPANYPYIVDTYTHYILENNKVEMFINDKEDSAPLLPVIEDDRYVVKTIPSCRMSTLEIPAMAFHMFLFGSKKTEKLIVDVHNRYKRLFQAMQKEEVTAENIASFGIAESDLPQKILDLISGNAHGKDVDAFIRLTVDDMLTDTERRIKRFKDDRKSIRSADNKMGKRGFKQISTGKLADFLAKDIVLFQPSVNDGENKITGLNYRIMQSAIAVYDSGDDYEAKQQFKLMFEKARLIGKGTTEPHPFLYKVFARSIPANAVEFYERYLIERKFYLTGLSNEIKKGNRVDVPFIRRDQNKWKTPAMKTLGRIYSEDLPVELPRQMFDNEIKSHLKSLPQMEGIDFNNANVTYLIAEYMKRVLDDDFQTFYQWNRNYRYMDMLKGEYDRKGSLQHCFTSVEEREGLWKERASRTERYRKQASNKIRSNRQMRNASSEEIETILDKRLSNSRNEYQKSEKVIRRYRVQDALLFLLAKKTLTELADFDGERFKLKEIMPDAEKGILSEIMPMSFTFEKGGKKYTITSEGMKLKNYGDFFVLASDKRIGNLLELVGSDIVSKEDIMEEFNKYDQCRPEISSIVFNLEKWAFDTYPELSARVDREEKVDFKSILKILLNNKNINKEQSDILRKIRNAFDANNYPDKGVVEIKALPEIAMSIKKAFGEYAIMKSRGGGGSGGGGSTRVSKGEEDNMAIIKEFMRFKVHMEGSVNGHEFEIEGEGEGRPYEGTQTAKLKVTKGGPLPFAWDILSPQFMYGSKAYVKHPADIPDYLKLSFPEGFKWERVMNFEDGGVVTVTQDSSLQDGEFIYKVKLRGTNFPSDGPVMQKKTMGWEASSERMYPEDGALKGEIKQRLKLKDGGHYDAEVKTTYKAKKPVQLPGAYNVNIKLDITSHNEDYTIVEQYERAEGRHSTGGMDELYK

SEQ ID NO: 107 - protein, 1404 aa, Artificial Sequence
  chemically synthesized
MDYKDHDGDYKDHDIDYKDDDDKGGKSKKRSLEDNETEIEVSRDTWNNKNMRSLEPPRSKKRINGGNIPALVENQKKYFGTYSVMAMLNAQTVLDHIQKVADIEGEQNENNENLWFHPVMSHLYNAKNGYDKQPEKTMFIIERLQSYFPFLKIMAENQREYSNGKYKQNRVEVNSNDIFEVLKRAFGVLKMYRDLTNAYKTYEEKLNDGCEFLTSTEQPLSGMINNYYTVALRNMNERYGYKTEDLAFIQDKRFKFVKDAYGKKKSQVNTGFFLSLQDYNGDTQKKLHLSGVGIALLICLFLDKQYINIFLSRLPIFSSYNAQSEERRIIIRSFGINSIKLPKDRIHSEKSNKSVAMDMLNEVKRCPDELFTTLSAEKQSRFRIISDDHNEVLMKRSSDRFVPLLLQYIDYGKLFDHIRFHVNMGKLRYLLKADKTCIDGQTRVRVIEQPLNGFGRLEEAETMRKQENGTFGNSGIRIRDFENMKRDDANPANYPYIVDTYTHYILENNKVEMFINDKEDSAPLLPVIEDDRYVVKTIPSCRMSTLEIPAMAFHMFLFGSKKTEKLIVDVHNRYKRLFQAMQKEEVTAENIASFGIAESDLPQKILDLISGNAHGKDVDAFIRLTVDDMLTDTERRIKRFKDDRKSIRSADNKMGKRGFKQISTGKLADFLAKDIVLFQPSVNDGENKITGLNYRIMQSAIAVYDSGDDYEAKQQFKLMFEKARLIGKGTTEPHPFLYKVFARSIPANAVEFYERYLIERKFYLTGLSNEIKKGNRVDVPFIRRDQNKWKTPAMKTLGRIYSEDLPVELPRQMFDNEIKSHLKSLPQMEGIDFNNANVTYLIAEYMKRVLDDDFQTFYQWNRNYRYMDMLKGEYDRKGSLQHCFTSVEEREGLWKERASRTERYRKQASNKIRSNRQMRNASSEEIETILDKRLSNSRNEYQKSEKVIRRYRVQDALLFLLAKKTLTELADFDGERFKLKEIMPDAEKGILSEIMPMSFTFEKGGKKYTITSEGMKLKNYGDFFVLASDKRIGNLLELVGSDIVSKEDIMEEFNKYDQCRPEISSIVFNLEKWAFDTYPELSARVDREEKVDFKSILKILLNNKNINKEQSDILRKIRNAFDANNYPDKGVVEIKALPEIAMSIKKAFGEYAIMKSRGGGGSGGGGSTRVSKGEEDNMAIIKEFMRFKVHMEGSVNGHEFEIEGEGEGRPYEGTQTAKLKVTKGGPLPFAWDILSPQFMYGSKAYVKHPADIPDYLKLSFPEGFKWERVMNFEDGGVVTVTQDSSLQDGEFIYKVKLRGTNFPSDGPVMQKKTMGWEASSERMYPEDGALKGEIKQRLKLKDGGHYDAEVKTTYKAKKPVQLPGAYNVNIKLDITSHNEDYTIVEQYERAEGRHSTGGMDELYK

SEQ ID NO: 108 - protein, 1376 aa, Artificial Sequence
  chemically synthesized
MDYKDHDGDYKDHDIDYKDDDDKGGLQLPPLERLTLGGNIPALVENQKKYFGTYSVMAMLNAQTVLDHIQKVADIEGEQNENNENLWFHPVMSHLYNAKNGYDKQPEKTMFIIERLQSYFPFLKIMAENQREYSNGKYKQNRVEVNSNDIFEVLKRAFGVLKMYRDLTNAYKTYEEKLNDGCEFLTSTEQPLSGMINNYYTVALRNMNERYGYKTEDLAFIQDKRFKFVKDAYGKKKSQVNTGFFLSLQDYNGDTQKKLHLSGVGIALLICLFLDKQYINIFLSRLPIFSSYNAQSEERRIIIRSFGINSIKLPKDRIHSEKSNKSVAMDMLNEVKRCPDELFTTLSAEKQSRFRIISDDHNEVLMKRSSDRFVPLLLQYIDYGKLFDHIRFHVNMGKLRYLLKADKTCIDGQTRVRVIEQPLNGFGRLEEAETMRKQENGTFGNSGIRIRDFENMKRDDANPANYPYIVDTYTHYILENNKVEMFINDKEDSAPLLPVIEDDRYVVKTIPSCRMSTLEIPAMAFHMFLFGSKKTEKLIVDVHNRYKRLFQAMQKEEVTAENIASFGIAESDLPQKILDLISGNAHGKDVDAFIRLTVDDMLTDTERRIKRFKDDRKSIRSADNKMGKRGFKQISTGKLADFLAKDIVLFQPSVNDGENKITGLNYRIMQSAIAVYDSGDDYEAKQQFKLMFEKARLIGKGTTEPHPFLYKVFARSIPANAVEFYERYLIERKFYLTGLSNEIKKGNRVDVPFIRRDQNKWKTPAMKTLGRIYSEDLPVELPRQMFDNEIKSHLKSLPQMEGIDFNNANVTYLIAEYMKRVLDDDFQTFYQWNRNYRYMDMLKGEYDRKGSLQHCFTSVEEREGLWKERASRTERYRKQASNKIRSNRQMRNASSEEIETILDKRLSNSRNEYQKSEKVIRRYRVQDALLFLLAKKTLTELADFDGERFKLKEIMPDAEKGILSEIMPMSFTFEKGGKKYTITSEGMKLKNYGDFFVLASDKRIGNLLELVGSDIVSKEDIMEEFNKYDQCRPEISSIVFNLEKWAFDTYPELSARVDREEKVDFKSILKILLNNKNINKEQSDILRKIRNAFDANNYPDKGVVEIKALPEIAMSIKKAFGEYAIMKSRGGGGSGGGGSTRVSKGEEDNMAIIKEFMRFKVHMEGSVNGHEFEIEGEGEGRPYEGTQTAKLKVTKGGPLPFAWDILSPQFMYGSKAYVKHPADIPDYLKLSFPEGFKWERVMNFEDGGVVTVTQDSSLQDGEFIYKVKLRGTNFPSDGPVMQKKTMGWEASSERMYPEDGALKGEIKQRLKLKDGGHYDAEVKTTYKAKKPVQLPGAYNVNIKLDITSHNEDYTIVEQYERAEGRHSTGGMDELYK

SEQ ID NO: 109 - protein, 1381 aa, Artificial Sequence
  chemically synthesized
MDYKDHDGDYKDHDIDYKDDDDKGGGSLQLPPLERLTLGSSGGNIPALVENQKKYFGTYSVMAMLNAQTVLDHIQKVADIEGEQNENNENLWFHPVMSHLYNAKNGYDKQPEKTMFIIERLQSYFPFLKIMAENQREYSNGKYKQNRVEVNSNDIFEVLKRAFGVLKMYRDLTNAYKTYEEKLNDGCEFLTSTEQPLSGMINNYYTVALRNMNERYGYKTEDLAFIQDKRFKFVKDAYGKKKSQVNTGFFLSLQDYNGDTQKKLHLSGVGIALLICLFLDKQYINIFLSRLPIFSSYNAQSEERRIIIRSFGINSIKLPKDRIHSEKSNKSVAMDMLNEVKRCPDELFTTLSAEKQSRFRIISDDHNEVLMKRSSDRFVPLLLQYIDYGKLFDHIRFHVNMGKLRYLLKADKTCIDGQTRVRVIEQPLNGFGRLEEAETMRKQENGTFGNSGIRIRDFENMKRDDANPANYPYIVDTYTHYILENNKVEMFINDKEDSAPLLPVIEDDRYVVKTIPSCRMSTLEIPAMAFHMFLFGSKKTEKLIVDVHNRYKRLFQAMQKEEVTAENIASFGIAESDLPQKILDLISGNAHGKDVDAFIRLTVDDMLTDTERRIKRFKDDRKSIRSADNKMGKRGFKQISTGKLADFLAKDIVLFQPSVNDGENKITGLNYRIMQSAIAVYDSGDDYEAKQQFKLMFEKARLIGKGTTEPHPFLYKVFARSIPANAVEFYERYLIERKFYLTGLSNEIKKGNRVDVPFIRRDQNKWKTPAMKTLGRIYSEDLPVELPRQMFDNEIKSHLKSLPQMEGIDFNNANVTYLIAEYMKRVLDDDFQTFYQWNRNYRYMDMLKGEYDRKGSLQHCFTSVEEREGLWKERASRTERYRKQASNKIRSNRQMRNASSEEIETILDKRLSNSRNEYQKSEKVIRRYRVQDALLFLLAKKTLTELADFDGERFKLKEIMPDAEKGILSEIMPMSFTFEKGGKKYTITSEGMKLKNYGDFFVLASDKRIGNLLELVGSDIVSKEDIMEEFNKYDQCRPEISSIVFNLEKWAFDTYPELSARVDREEKVDFKSILKILLNNKNINKEQSDILRKIRNAFDANNYPDKGVVEIKALPEIAMSIKKAFGEYAIMKSRGGGGSGGGGSTRVSKGEEDNMAIIKEFMRFKVHMEGSVNGHEFEIEGEGEGRPYEGTQTAKLKVTKGGPLPFAWDILSPQFMYGSKAYVKHPADIPDYLKLSFPEGFKWERVMNFEDGGVVTVTQDSSLQDGEFIYKVKLRGTNFPSDGPVMQKKTMGWEASSERMYPEDGALKGEIKQRLKLKDGGHYDAEVKTTYKAKKPVQLPGAYNVNIKLDITSHNEDYTIVEQYERAEGRHSTGGMDELYK

SEQ ID NO: 110 - protein, 1397 aa, Artificial Sequence
  chemically synthesized
MDYKDHDGDYKDHDIDYKDDDDKGGMSVLTPLLLRGLTGSARRLPVPRAKIHSLGDPGGNIPALVENQKKYFGTYSVMAMLNAQTVLDHIQKVADIEGEQNENNENLWFHPVMSHLYNAKNGYDKQPEKTMFIIERLQSYFPFLKIMAENQREYSNGKYKQNRVEVNSNDIFEVLKRAFGVLKMYRDLTNAYKTYEEKLNDGCEFLTSTEQPLSGMINNYYTVALRNMNERYGYKTEDLAFIQDKRFKFVKDAYGKKKSQVNTGFFLSLQDYNGDTQKKLHLSGVGIALLICLFLDKQYINIFLSRLPIFSSYNAQSEERRIIIRSFGINSIKLPKDRIHSEKSNKSVAMDMLNEVKRCPDELFTTLSAEKQSRFRIISDDHNEVLMKRSSDRFVPLLLQYIDYGKLFDHIRFHVNMGKLRYLLKADKTCIDGQTRVRVIEQPLNGFGRLEEAETMRKQENGTFGNSGIRIRDFENMKRDDANPANYPYIVDTYTHYILENNKVEMFINDKEDSAPLLPVIEDDRYVVKTIPSCRMSTLEIPAMAFHMFLFGSKKTEKLIVDVHNRYKRLFQAMQKEEVTAENIASFGIAESDLPQKILDLISGNAHGKDVDAFIRLTVDDMLTDTERRIKRFKDDRKSIRSADNKMGKRGFKQISTGKLADFLAKDIVLFQPSVNDGENKITGLNYRIMQSAIAVYDSGDDYEAKQQFKLMFEKARLIGKGTTEPHPFLYKVFARSIPANAVEFYERYLIERKFYLTGLSNEIKKGNRVDVPFIRRDQNKWKTPAMKTLGRIYSEDLPVELPRQMFDNEIKSHLKSLPQMEGIDFNNANVTYLIAEYMKRVLDDDFQTFYQWNRNYRYMDMLKGEYDRKGSLQHCFTSVEEREGLWKERASRTERYRKQASNKIRSNRQMRNASSEEIETILDKRLSNSRNEYQKSEKVIRRYRVQDALLFLLAKKTLTELADFDGERFKLKEIMPDAEKGILSEIMPMSFTFEKGGKKYTITSEGMKLKNYGDFFVLASDKRIGNLLELVGSDIVSKEDIMEEFNKYDQCRPEISSIVFNLEKWAFDTYPELSARVDREEKVDFKSILKILLNNKNINKEQSDILRKIRNAFDANNYPDKGVVEIKALPEIAMSIKKAFGEYAIMKSRGGGGSGGGGSTRVSKGEEDNMAIIKEFMRFKVHMEGSVNGHEFEIEGEGEGRPYEGTQTAKLKVTKGGPLPFAWDILSPQFMYGSKAYVKHPADIPDYLKLSFPEGFKWERVMNFEDGGVVTVTQDSSLQDGEFIYKVKLRGTNFPSDGPVMQKKTMGWEASSERMYPEDGALKGEIKQRLKLKDGGHYDAEVKTTYKAKKPVQLPGAYNVNIKLDITSHNEDYTIVEQYERAEGRHSTGGMDELYK

SEQ ID NO: 111 - protein, 1495 aa, Artificial Sequence
  chemically synthesized
MDYKDHDGDYKDHDIDYKDDDDKGGMSVLTPLLLRGLTGSARRLPVPRAKIHSLGDPMSVLTPLLLRGLTGSARRLPVPRAKIHSLGKLATMSVLTPLLLRGLTGSARRLPVPRAKIHSLGDPMSVLTPLLLRGLTGSARRLPVPRAKIHSLGKLGGNIPALVENQKKYFGTYSVMAMLNAQTVLDHIQKVADIEGEQNENNENLWFHPVMSHLYNAKNGYDKQPEKTMFIIERLQSYFPFLKIMAENQREYSNGKYKQNRVEVNSNDIFEVLKRAFGVLKMYRDLTNAYKTYEEKLNDGCEFLTSTEQPLSGMINNYYTVALRNMNERYGYKTEDLAFIQDKRFKFVKDAYGKKKSQVNTGFFLSLQDYNGDTQKKLHLSGVGIALLICLFLDKQYINIFLSRLPIFSSYNAQSEERRIIIRSFGINSIKLPKDRIHSEKSNKSVAMDMLNEVKRCPDELFTTLSAEKQSRFRIISDDHNEVLMKRSSDRFVPLLLQYIDYGKLFDHIRFHVNMGKLRYLLKADKTCIDGQTRVRVIEQPLNGFGRLEEAETMRKQENGTFGNSGIRIRDFENMKRDDANPANYPYIVDTYTHYILENNKVEMFINDKEDSAPLLPVIEDDRYVVKTIPSCRMSTLEIPAMAFHMFLFGSKKTEKLIVDVHNRYKRLFQAMQKEEVTAENIASFGIAESDLPQKILDLISGNAHGKDVDAFIRLTVDDMLTDTERRIKRFKDDRKSIRSADNKMGKRGFKQISTGKLADFLAKDIVLFQPSVNDGENKITGLNYRIMQSAIAVYDSGDDYEAKQQFKLMFEKARLIGKGTTEPHPFLYKVFARSIPANAVEFYERYLIERKFYLTGLSNEIKKGNRVDVPFIRRDQNKWKTPAMKTLGRIYSEDLPVELPRQMFDNEIKSHLKSLPQMEGIDFNNANVTYLIAEYMKRVLDDDFQTFYQWNRNYRYMDMLKGEYDRKGSLQHCFTSVEEREGLWKERASRTERYRKQASNKIRSNRQMRNASSEEIETILDKRLSNSRNEYQKSEKVIRRYRVQDALLFLLAKKTLTELADFDGERFKLKEIMPDAEKGILSEIMPMSFTFEKGGKKYTITSEGMKLKNYGDFFVLASDKRIGNLLELVGSDIVSKEDIMEEFNKYDQCRPEISSIVFNLEKWAFDTYPELSARVDREEKVDFKSILKILLNNKNINKEQSDILRKIRNAFDANNYPDKGVVEIKALPEIAMSIKKAFGEYAIMKSRGGGGSGGGGSTRVSKGEEDNMAIIKEFMRFKVHMEGSVNGHEFEIEGEGEGRPYEGTQTAKLKVTKGGPLPFAWDILSPQFMYGSKAYVKHPADIPDYLKLSFPEGFKWERVMNFEDGGVVTVTQDSSLQDGEFIYKVKLRGTNFPSDGPVMQKKTMGWEASSERMYPEDGALKGEIKQRLKLKDGGHYDAEVKTTYKAKKPVQLPGAYNVNIKLDITSHNEDYTIVEQYERAEGRHSTGGMDELYK

SEQ ID NO: 112 - protein, 1386 aa, Artificial Sequence
  chemically synthesized
MDYKDHDGDYKDHDIDYKDDDDKGGMYRMQLLSCIALSLALVTNSLGGNIPALVENQKKYFGTYSVMAMLNAQTVLDHIQKVADIEGEQNENNENLWFHPVMSHLYNAKNGYDKQPEKTMFIIERLQSYFPFLKIMAENQREYSNGKYKQNRVEVNSNDIFEVLKRAFGVLKMYRDLTNAYKTYEEKLNDGCEFLTSTEQPLSGMINNYYTVALRNMNERYGYKTEDLAFIQDKRFKFVKDAYGKKKSQVNTGFFLSLQDYNGDTQKKLHLSGVGIALLICLFLDKQYINIFLSRLPIFSSYNAQSEERRIIIRSFGINSIKLPKDRIHSEKSNKSVAMDMLNEVKRCPDELFTTLSAEKQSRFRIISDDHNEVLMKRSSDRFVPLLLQYIDYGKLFDHIRFHVNMGKLRYLLKADKTCIDGQTRVRVIEQPLNGFGRLEEAETMRKQENGTFGNSGIRIRDFENMKRDDANPANYPYIVDTYTHYILENNKVEMFINDKEDSAPLLPVIEDDRYVVKTIPSCRMSTLEIPAMAFHMFLFGSKKTEKLIVDVHNRYKRLFQAMQKEEVTAENIASFGIAESDLPQKILDLISGNAHGKDVDAFIRLTVDDMLTDTERRIKRFKDDRKSIRSADNKMGKRGFKQISTGKLADFLAKDIVLFQPSVNDGENKITGLNYRIMQSAIAVYDSGDDYEAKQQFKLMFEKARLIGKGTTEPHPFLYKVFARSIPANAVEFYERYLIERKFYLTGLSNEIKKGNRVDVPFIRRDQNKWKTPAMKTLGRIYSEDLPVELPRQMFDNEIKSHLKSLPQMEGIDFNNANVTYLIAEYMKRVLDDDFQTFYQWNRNYRYMDMLKGEYDRKGSLQHCFTSVEEREGLWKERASRTERYRKQASNKIRSNRQMRNASSEEIETILDKRLSNSRNEYQKSEKVIRRYRVQDALLFLLAKKTLTELADFDGERFKLKEIMPDAEKGILSEIMPMSFTFEKGGKKYTITSEGMKLKNYGDFFVLASDKRIGNLLELVGSDIVSKEDIMEEFNKYDQCRPEISSIVFNLEKWAFDTYPELSARVDREEKVDFKSILKILLNNKNINKEQSDILRKIRNAFDANNYPDKGVVEIKALPEIAMSIKKAFGEYAIMKSRGGGGSGGGGSTRVSKGEEDNMAIIKEFMRFKVHMEGSVNGHEFEIEGEGEGRPYEGTQTAKLKVTKGGPLPFAWDILSPQFMYGSKAYVKHPADIPDYLKLSFPEGFKWERVMNFEDGGVVTVTQDSSLQDGEFIYKVKLRGTNFPSDGPVMQKKTMGWEASSERMYPEDGALKGEIKQRLKLKDGGHYDAEVKTTYKAKKPVQLPGAYNVNIKLDITSHNEDYTIVEQYERAEGRHSTGGMDELYK

SEQ ID NO: 113 - protein, 1408 aa, Artificial Sequence
  chemically synthesized
MDYKDHDGDYKDHDIDYKDDDDKGGMGCCFSKTAAKGEAAAERPGEAAVASSPSKANGQENGHVKVGSGGNIPALVENQKKYFGTYSVMAMLNAQTVLDHIQKVADIEGEQNENNENLWFHPVMSHLYNAKNGYDKQPEKTMFIIERLQSYFPFLKIMAENQREYSNGKYKQNRVEVNSNDIFEVLKRAFGVLKMYRDLTNAYKTYEEKLNDGCEFLTSTEQPLSGMINNYYTVALRNMNERYGYKTEDLAFIQDKRFKFVKDAYGKKKSQVNTGFFLSLQDYNGDTQKKLHLSGVGIALLICLFLDKQYINIFLSRLPIFSSYNAQSEERRIIIRSFGINSIKLPKDRIHSEKSNKSVAMDMLNEVKRCPDELFTTLSAEKQSRFRIISDDHNEVLMKRSSDRFVPLLLQYIDYGKLFDHIRFHVNMGKLRYLLKADKTCIDGQTRVRVIEQPLNGFGRLEEAETMRKQENGTFGNSGIRIRDFENMKRDDANPANYPYIVDTYTHYILENNKVEMFINDKEDSAPLLPVIEDDRYVVKTIPSCRMSTLEIPAMAFHMFLFGSKKTEKLIVDVHNRYKRLFQAMQKEEVTAENIASFGIAESDLPQKILDLISGNAHGKDVDAFIRLTVDDMLTDTERRIKRFKDDRKSIRSADNKMGKRGFKQISTGKLADFLAKDIVLFQPSVNDGENKITGLNYRIMQSAIAVYDSGDDYEAKQQFKLMFEKARLIGKGTTEPHPFLYKVFARSIPANAVEFYERYLIERKFYLTGLSNEIKKGNRVDVPFIRRDQNKWKTPAMKTLGRIYSEDLPVELPRQMFDNEIKSHLKSLPQMEGIDFNNANVTYLIAEYMKRVLDDDFQTFYQWNRNYRYMDMLKGEYDRKGSLQHCFTSVEEREGLWKERASRTERYRKQASNKIRSNRQMRNASSEEIETILDKRLSNSRNEYQKSEKVIRRYRVQDALLFLLAKKTLTELADFDGERFKLKEIMPDAEKGILSEIMPMSFTFEKGGKKYTITSEGMKLKNYGDFFVLASDKRIGNLLELVGSDIVSKEDIMEEFNKYDQCRPEISSIVFNLEKWAFDTYPELSARVDREEKVDFKSILKILLNNKNINKEQSDILRKIRNAFDANNYPDKGVVEIKALPEIAMSIKKAFGEYAIMKSRGGGGSGGGGSTRVSKGEEDNMAIIKEFMRFKVHMEGSVNGHEFEIEGEGEGRPYEGTQTAKLKVTKGGPLPFAWDILSPQFMYGSKAYVKHPADIPDYLKLSFPEGFKWERVMNFEDGGVVTVTQDSSLQDGEFIYKVKLRGTNFPSDGPVMQKKTMGWEASSERMYPEDGALKGEIKQRLKLKDGGHYDAEVKTTYKAKKPVQLPGAYNVNIKLDITSHNEDYTIVEQYERAEGRHSTGGMDELYK

SEQ ID NO: 114 - protein, 1382 aa, Artificial Sequence
  chemically synthesized
MDYKDHDGDYKDHDIDYKDDDDKGGMLLPVPLLLGLLGAAADGGNIPALVENQKKYFGTYSVMAMLNAQTVLDHIQKVADIEGEQNENNENLWFHPVMSHLYNAKNGYDKQPEKTMFIIERLQSYFPFLKIMAENQREYSNGKYKQNRVEVNSNDIFEVLKRAFGVLKMYRDLTNAYKTYEEKLNDGCEFLTSTEQPLSGMINNYYTVALRNMNERYGYKTEDLAFIQDKRFKFVKDAYGKKKSQVNTGFFLSLQDYNGDTQKKLHLSGVGIALLICLFLDKQYINIFLSRLPIFSSYNAQSEERRIIIRSFGINSIKLPKDRIHSEKSNKSVAMDMLNEVKRCPDELFTTLSAEKQSRFRIISDDHNEVLMKRSSDRFVPLLLQYIDYGKLFDHIRFHVNMGKLRYLLKADKTCIDGQTRVRVIEQPLNGFGRLEEAETMRKQENGTFGNSGIRIRDFENMKRDDANPANYPYIVDTYTHYILENNKVEMFINDKEDSAPLLPVIEDDRYVVKTIPSCRMSTLEIPAMAFHMFLFGSKKTEKLIVDVHNRYKRLFQAMQKEEVTAENIASFGIAESDLPQKILDLISGNAHGKDVDAFIRLTVDDMLTDTERRIKRFKDDRKSIRSADNKMGKRGFKQISTGKLADFLAKDIVLFQPSVNDGENKITGLNYRIMQSAIAVYDSGDDYEAKQQFKLMFEKARLIGKGTTEPHPFLYKVFARSIPANAVEFYERYLIERKFYLTGLSNEIKKGNRVDVPFIRRDQNKWKTPAMKTLGRIYSEDLPVELPRQMFDNEIKSHLKSLPQMEGIDFNNANVTYLIAEYMKRVLDDDFQTFYQWNRNYRYMDMLKGEYDRKGSLQHCFTSVEEREGLWKERASRTERYRKQASNKIRSNRQMRNASSEEIETILDKRLSNSRNEYQKSEKVIRRYRVQDALLFLLAKKTLTELADFDGERFKLKEIMPDAEKGILSEIMPMSFTFEKGGKKYTITSEGMKLKNYGDFFVLASDKRIGNLLELVGSDIVSKEDIMEEFNKYDQCRPEISSIVFNLEKWAFDTYPELSARVDREEKVDFKSILKILLNNKNINKEQSDILRKIRNAFDANNYPDKGVVEIKALPEIAMSIKKAFGEYAIMKSRGGGGSGGGGSTRVSKGEEDNMAIIKEFMRFKVHMEGSVNGHEFEIEGEGEGRPYEGTQTAKLKVTKGGPLPFAWDILSPQFMYGSKAYVKHPADIPDYLKLSFPEGFKWERVMNFEDGGVVTVTQDSSLQDGEFIYKVKLRGTNFPSDGPVMQKKTMGWEASSERMYPEDGALKGEIKQRLKLKDGGHYDAEVKTTYKAKKPVQLPGAYNVNIKLDITSHNEDYTIVEQYERAEGRHSTGGMDELYK

SEQ ID NO: 115 - protein, 1374 aa, Artificial Sequence
  chemically synthesized
MDYKDHDGDYKDHDIDYKDDDDKGGGITLGKDELGGNIPALVENQKKYFGTYSVMAMLNAQTVLDHIQKVADIEGEQNENNENLWFHPVMSHLYNAKNGYDKQPEKTMFIIERLQSYFPFLKIMAENQREYSNGKYKQNRVEVNSNDIFEVLKRAFGVLKMYRDLTNAYKTYEEKLNDGCEFLTSTEQPLSGMINNYYTVALRNMNERYGYKTEDLAFIQDKRFKFVKDAYGKKKSQVNTGFFLSLQDYNGDTQKKLHLSGVGIALLICLFLDKQYINIFLSRLPIFSSYNAQSEERRIIIRSFGINSIKLPKDRIHSEKSNKSVAMDMLNEVKRCPDELFTTLSAEKQSRFRIISDDHNEVLMKRSSDRFVPLLLQYIDYGKLFDHIRFHVNMGKLRYLLKADKTCIDGQTRVRVIEQPLNGFGRLEEAETMRKQENGTFGNSGIRIRDFENMKRDDANPANYPYIVDTYTHYILENNKVEMFINDKEDSAPLLPVIEDDRYVVKTIPSCRMSTLEIPAMAFHMFLFGSKKTEKLIVDVHNRYKRLFQAMQKEEVTAENIASFGIAESDLPQKILDLISGNAHGKDVDAFIRLTVDDMLTDTERRIKRFKDDRKSIRSADNKMGKRGFKQISTGKLADFLAKDIVLFQPSVNDGENKITGLNYRIMQSAIAVYDSGDDYEAKQQFKLMFEKARLIGKGTTEPHPFLYKVFARSIPANAVEFYERYLIERKFYLTGLSNEIKKGNRVDVPFIRRDQNKWKTPAMKTLGRIYSEDLPVELPRQMFDNEIKSHLKSLPQMEGIDFNNANVTYLIAEYMKRVLDDDFQTFYQWNRNYRYMDMLKGEYDRKGSLQHCFTSVEEREGLWKERASRTERYRKQASNKIRSNRQMRNASSEEIETILDKRLSNSRNEYQKSEKVIRRYRVQDALLFLLAKKTLTELADFDGERFKLKEIMPDAEKGILSEIMPMSFTFEKGGKKYTITSEGMKLKNYGDFFVLASDKRIGNLLELVGSDIVSKEDIMEEFNKYDQCRPEISSIVFNLEKWAFDTYPELSARVDREEKVDFKSILKILLNNKNINKEQSDILRKIRNAFDANNYPDKGVVEIKALPEIAMSIKKAFGEYAIMKSRGGGGSGGGGSTRVSKGEEDNMAIIKEFMRFKVHMEGSVNGHEFEIEGEGEGRPYEGTQTAKLKVTKGGPLPFAWDILSPQFMYGSKAYVKHPADIPDYLKLSFPEGFKWERVMNFEDGGVVTVTQDSSLQDGEFIYKVKLRGTNFPSDGPVMQKKTMGWEASSERMYPEDGALKGEIKQRLKLKDGGHYDAEVKTTYKAKKPVQLPGAYNVNIKLDITSHNEDYTIVEQYERAEGRHSTGGMDELYK

SEQ ID NO: 116 - protein, 1368 aa, Artificial Sequence
  chemically synthesized
MDYKDHDGDYKDHDIDYKDDDDKGGSKLGGNIPALVENQKKYFGTYSVMAMLNAQTVLDHIQKVADIEGEQNENNENLWFHPVMSHLYNAKNGYDKQPEKTMFIIERLQSYFPFLKIMAENQREYSNGKYKQNRVEVNSNDIFEVLKRAFGVLKMYRDLTNAYKTYEEKLNDGCEFLTSTEQPLSGMINNYYTVALRNMNERYGYKTEDLAFIQDKRFKFVKDAYGKKKSQVNTGFFLSLQDYNGDTQKKLHLSGVGIALLICLFLDKQYINIFLSRLPIFSSYNAQSEERRIIIRSFGINSIKLPKDRIHSEKSNKSVAMDMLNEVKRCPDELFTTLSAEKQSRFRIISDDHNEVLMKRSSDRFVPLLLQYIDYGKLFDHIRFHVNMGKLRYLLKADKTCIDGQTRVRVIEQPLNGFGRLEEAETMRKQENGTFGNSGIRIRDFENMKRDDANPANYPYIVDTYTHYILENNKVEMFINDKEDSAPLLPVIEDDRYVVKTIPSCRMSTLEIPAMAFHMFLFGSKKTEKLIVDVHNRYKRLFQAMQKEEVTAENIASFGIAESDLPQKILDLISGNAHGKDVDAFIRLTVDDMLTDTERRIKRFKDDRKSIRSADNKMGKRGFKQISTGKLADFLAKDIVLFQPSVNDGENKITGLNYRIMQSAIAVYDSGDDYEAKQQFKLMFEKARLIGKGTTEPHPFLYKVFARSIPANAVEFYERYLIERKFYLTGLSNEIKKGNRVDVPFIRRDQNKWKTPAMKTLGRIYSEDLPVELPRQMFDNEIKSHLKSLPQMEGIDFNNANVTYLIAEYMKRVLDDDFQTFYQWNRNYRYMDMLKGEYDRKGSLQHCFTSVEEREGLWKERASRTERYRKQASNKIRSNRQMRNASSEEIETILDKRLSNSRNEYQKSEKVIRRYRVQDALLFLLAKKTLTELADFDGERFKLKEIMPDAEKGILSEIMPMSFTFEKGGKKYTITSEGMKLKNYGDFFVLASDKRIGNLLELVGSDIVSKEDIMEEFNKYDQCRPEISSIVFNLEKWAFDTYPELSARVDREEKVDFKSILKILLNNKNINKEQSDILRKIRNAFDANNYPDKGVVEIKALPEIAMSIKKAFGEYAIMKSRGGGGSGGGGSTRVSKGEEDNMAIIKEFMRFKVHMEGSVNGHEFEIEGEGEGRPYEGTQTAKLKVTKGGPLPFAWDILSPQFMYGSKAYVKHPADIPDYLKLSFPEGFKWERVMNFEDGGVVTVTQDSSLQDGEFIYKVKLRGTNFPSDGPVMQKKTMGWEASSERMYPEDGALKGEIKQRLKLKDGGHYDAEVKTTYKAKKPVQLPGAYNVNIKLDITSHNEDYTIVEQYERAEGRHSTGGMDELYK

SEQ ID NO: 117 - protein, 1297 aa, Artificial Sequence
  chemically synthesized
MDYKDHDGDYKDHDIDYKDDDDKGGNSKKRSLEDNETEIKVSRDTWNTKNMRSLEPPRSKKRIHGGNIPALVENQKKYFGTYSVMAMLNAQTVLDHIQKVADIEGEQNENNENLWFHPVMSHLYNAKNGYDKQPEKTMFIIERLQSYFPFLKIMAENQREYSNGKYKQNRVEVNSNDIFEVLKRAFGVLKMYRDLTNAYKTYEEKLNDGCEFLTSTEQPLSGMINNYYTVALRNMNERYGYKTEDLAFIQDKRFKFVKDAYGKKKSQVNTGFFLSLQDYNGDTQKKLHLSGVGIALLICLFLDKQYINIFLSRLPIFSSYNAQSEERRIIIRSFGINSIKLPKDRIHSEKSNKSVAMDMLNEVKRCPDELFTTLSAEKQSRFRIISDDHNEVLMKRSSDRFVPLLLQYIDYGKLFDHIRFHVNMGKLRYLLKADKTCIDGQTRVRVIEQPLNGFGRLEEAETMRKQENGTFGNSGIRIRDFENMKRDDANPANYPYIVDTYTHYILENNKVEMFINDKEDSAPLLPVIEDDRYVVKTIPSCRMSTLEIPAMAFHMFLFGSKKTEKLIVDVHNRYKRLFQAMQKEEVTAENIASFGIAESDLPQKILDLISGNAHGKDVDAFIRLTVDDMLTDTERRIKRFKDDRKSIRSADNKMGKRGFKQISTGKLADFLAKDIVLFQPSVNDGENKITGLNYRIMQSAIAVYDSGDDYEAKQQFKLMFEKARLIGKGTTEPHPFLYKVFARSIPANAVEFYERYLIERKFYLTGLSNEIKKGNRVDVPFIRRDQNKWKTPAMKTLGRIYSEDLPVELPRQMFDNEIKSHLKSLPQMEGIDFNNANVTYLIAEYMKRVLDDDFQTFYQWNRNYRYMDMLKGEYDRKGSLQHCFTSVEEREGLWKERASRTERYRKQASNKIRSNRQMRNASSEEIETILDKRLSNSRNEYQKSEKVIRRYRVQDALLFLLAKKTLTELADFDGERFKLKEIMPDAEKGILSEIMPMSFTFEKGGKKYTITSEGMKLKNYGDFFVLASDKRIGNLLELVGSDIVSKEDSRGGGGSGGGGSTRVSKGEEDNMAIIKEFMRFKVHMEGSVNGHEFEIEGEGEGRPYEGTQTAKLKVTKGGPLPFAWDILSPQFMYGSKAYVKHPADIPDYLKLSFPEGFKWERVMNFEDGGVVTVTQDSSLQDGEFIYKVKLRGTNFPSDGPVMQKKTMGWEASSERMYPEDGALKGEIKQRLKLKDGGHYDAEVKTTYKAKKPVQLPGAYNVNIKLDITSHNEDYTIVEQYERAEGRHSTGGMDELYK

SEQ ID NO: 118 - protein, 1297 aa, Artificial Sequence
  chemically synthesized
MDYKDHDGDYKDHDIDYKDDDDKGGKSKKRSLEDNETEIEVSRDTWNNKNMRSLEPPRSKKRINGGNIPALVENQKKYFGTYSVMAMLNAQTVLDHIQKVADIEGEQNENNENLWFHPVMSHLYNAKNGYDKQPEKTMFIIERLQSYFPFLKIMAENQREYSNGKYKQNRVEVNSNDIFEVLKRAFGVLKMYRDLTNAYKTYEEKLNDGCEFLTSTEQPLSGMINNYYTVALRNMNERYGYKTEDLAFIQDKRFKFVKDAYGKKKSQVNTGFFLSLQDYNGDTQKKLHLSGVGIALLICLFLDKQYINIFLSRLPIFSSYNAQSEERRIIIRSFGINSIKLPKDRIHSEKSNKSVAMDMLNEVKRCPDELFTTLSAEKQSRFRIISDDHNEVLMKRSSDRFVPLLLQYIDYGKLFDHIRFHVNMGKLRYLLKADKTCIDGQTRVRVIEQPLNGFGRLEEAETMRKQENGTFGNSGIRIRDFENMKRDDANPANYPYIVDTYTHYILENNKVEMFINDKEDSAPLLPVIEDDRYVVKTIPSCRMSTLEIPAMAFHMFLFGSKKTEKLIVDVHNRYKRLFQAMQKEEVTAENIASFGIAESDLPQKILDLISGNAHGKDVDAFIRLTVDDMLTDTERRIKRFKDDRKSIRSADNKMGKRGFKQISTGKLADFLAKDIVLFQPSVNDGENKITGLNYRIMQSAIAVYDSGDDYEAKQQFKLMFEKARLIGKGTTEPHPFLYKVFARSIPANAVEFYERYLIERKFYLTGLSNEIKKGNRVDVPFIRRDQNKWKTPAMKTLGRIYSEDLPVELPRQMFDNEIKSHLKSLPQMEGIDFNNANVTYLIAEYMKRVLDDDFQTFYQWNRNYRYMDMLKGEYDRKGSLQHCFTSVEEREGLWKERASRTERYRKQASNKIRSNRQMRNASSEEIETILDKRLSNSRNEYQKSEKVIRRYRVQDALLFLLAKKTLTELADFDGERFKLKEIMPDAEKGILSEIMPMSFTFEKGGKKYTITSEGMKLKNYGDFFVLASDKRIGNLLELVGSDIVSKEDSRGGGGSGGGGSTRVSKGEEDNMAIIKEFMRFKVHMEGSVNGHEFEIEGEGEGRPYEGTQTAKLKVTKGGPLPFAWDILSPQFMYGSKAYVKHPADIPDYLKLSFPEGFKWERVMNFEDGGVVTVTQDSSLQDGEFIYKVKLRGTNFPSDGPVMQKKTMGWEASSERMYPEDGALKGEIKQRLKLKDGGHYDAEVKTTYKAKKPVQLPGAYNVNIKLDITSHNEDYTIVEQYERAEGRHSTGGMDELYK

SEQ ID NO: 119 - protein, 1269 aa, Artificial Sequence
  chemically synthesized
MDYKDHDGDYKDHDIDYKDDDDKGGLQLPPLERLTLGGNIPALVENQKKYFGTYSVMAMLNAQTVLDHIQKVADIEGEQNENNENLWFHPVMSHLYNAKNGYDKQPEKTMFIIERLQSYFPFLKIMAENQREYSNGKYKQNRVEVNSNDIFEVLKRAFGVLKMYRDLTNAYKTYEEKLNDGCEFLTSTEQPLSGMINNYYTVALRNMNERYGYKTEDLAFIQDKRFKFVKDAYGKKKSQVNTGFFLSLQDYNGDTQKKLHLSGVGIALLICLFLDKQYINIFLSRLPIFSSYNAQSEERRIIIRSFGINSIKLPKDRIHSEKSNKSVAMDMLNEVKRCPDELFTTLSAEKQSRFRIISDDHNEVLMKRSSDRFVPLLLQYIDYGKLFDHIRFHVNMGKLRYLLKADKTCIDGQTRVRVIEQPLNGFGRLEEAETMRKQENGTFGNSGIRIRDFENMKRDDANPANYPYIVDTYTHYILENNKVEMFINDKEDSAPLLPVIEDDRYVVKTIPSCRMSTLEIPAMAFHMFLFGSKKTEKLIVDVHNRYKRLFQAMQKEEVTAENIASFGIAESDLPQKILDLISGNAHGKDVDAFIRLTVDDMLTDTERRIKRFKDDRKSIRSADNKMGKRGFKQISTGKLADFLAKDIVLFQPSVNDGENKITGLNYRIMQSAIAVYDSGDDYEAKQQFKLMFEKARLIGKGTTEPHPFLYKVFARSIPANAVEFYERYLIERKFYLTGLSNEIKKGNRVDVPFIRRDQNKWKTPAMKTLGRIYSEDLPVELPRQMFDNEIKSHLKSLPQMEGIDFNNANVTYLIAEYMKRVLDDDFQTFYQWNRNYRYMDMLKGEYDRKGSLQHCFTSVEEREGLWKERASRTERYRKQASNKIRSNRQMRNASSEEIETILDKRLSNSRNEYQKSEKVIRRYRVQDALLFLLAKKTLTELADFDGERFKLKEIMPDAEKGILSEIMPMSFTFEKGGKKYTITSEGMKLKNYGDFFVLASDKRIGNLLELVGSDIVSKEDSRGGGGSGGGGSTRVSKGEEDNMAIIKEFMRFKVHMEGSVNGHEFEIEGEGEGRPYEGTQTAKLKVTKGGPLPFAWDILSPQFMYGSKAYVKHPADIPDYLKLSFPEGFKWERVMNFEDGGVVTVTQDSSLQDGEFIYKVKLRGTNFPSDGPVMQKKTMGWEASSERMYPEDGALKGEIKQRLKLKDGGHYDAEVKTTYKAKKPVQLPGAYNVNIKLDITSHNEDYTIVEQYERAEGRHSTGGMDELYK

SEQ ID NO: 120 - protein, 1274 aa, Artificial Sequence
  chemically synthesized
MDYKDHDGDYKDHDIDYKDDDDKGGGSLQLPPLERLTLGSSGGNIPALVENQKKYFGTYSVMAMLNAQTVLDHIQKVADIEGEQNENNENLWFHPVMSHLYNAKNGYDKQPEKTMFIIERLQSYFPFLKIMAENQREYSNGKYKQNRVEVNSNDIFEVLKRAFGVLKMYRDLTNAYKTYEEKLNDGCEFLTSTEQPLSGMINNYYTVALRNMNERYGYKTEDLAFIQDKRFKFVKDAYGKKKSQVNTGFFLSLQDYNGDTQKKLHLSGVGIALLICLFLDKQYINIFLSRLPIFSSYNAQSEERRIIIRSFGINSIKLPKDRIHSEKSNKSVAMDMLNEVKRCPDELFTTLSAEKQSRFRIISDDHNEVLMKRSSDRFVPLLLQYIDYGKLFDHIRFHVNMGKLRYLLKADKTCIDGQTRVRVIEQPLNGFGRLEEAETMRKQENGTFGNSGIRIRDFENMKRDDANPANYPYIVDTYTHYILENNKVEMFINDKEDSAPLLPVIEDDRYVVKTIPSCRMSTLEIPAMAFHMFLFGSKKTEKLIVDVHNRYKRLFQAMQKEEVTAENIASFGIAESDLPQKILDLISGNAHGKDVDAFIRLTVDDMLTDTERRIKRFKDDRKSIRSADNKMGKRGFKQISTGKLADFLAKDIVLFQPSVNDGENKITGLNYRIMQSAIAVYDSGDDYEAKQQFKLMFEKARLIGKGTTEPHPFLYKVFARSIPANAVEFYERYLIERKFYLTGLSNEIKKGNRVDVPFIRRDQNKWKTPAMKTLGRIYSEDLPVELPRQMFDNEIKSHLKSLPQMEGIDFNNANVTYLIAEYMKRVLDDDFQTFYQWNRNYRYMDMLKGEYDRKGSLQHCFTSVEEREGLWKERASRTERYRKQASNKIRSNRQMRNASSEEIETILDKRLSNSRNEYQKSEKVIRRYRVQDALLFLLAKKTLTELADFDGERFKLKEIMPDAEKGILSEIMPMSFTFEKGGKKYTITSEGMKLKNYGDFFVLASDKRIGNLLELVGSDIVSKEDSRGGGGSGGGGSTRVSKGEEDNMAIIKEFMRFKVHMEGSVNGHEFEIEGEGEGRPYEGTQTAKLKVTKGGPLPFAWDILSPQFMYGSKAYVKHPADIPDYLKLSFPEGFKWERVMNFEDGGVVTVTQDSSLQDGEFIYKVKLRGTNFPSDGPVMQKKTMGWEASSERMYPEDGALKGEIKQRLKLKDGGHYDAEVKTTYKAKKPVQLPGAYNVNIKLDITSHNEDYTIVEQYERAEGRHSTGGMDELYK

SEQ ID NO: 121 - protein, 1290 aa, Artificial Sequence
  chemically synthesized
MDYKDHDGDYKDHDIDYKDDDDKGGMSVLTPLLLRGLTGSARRLPVPRAKIHSLGDPGGNIPALVENQKKYFGTYSVMAMLNAQTVLDHIQKVADIEGEQNENNENLWFHPVMSHLYNAKNGYDKQPEKTMFIIERLQSYFPFLKIMAENQREYSNGKYKQNRVEVNSNDIFEVLKRAFGVLKMYRDLTNAYKTYEEKLNDGCEFLTSTEQPLSGMINNYYTVALRNMNERYGYKTEDLAFIQDKRFKFVKDAYGKKKSQVNTGFFLSLQDYNGDTQKKLHLSGVGIALLICLFLDKQYINIFLSRLPIFSSYNAQSEERRIIIRSFGINSIKLPKDRIHSEKSNKSVAMDMLNEVKRCPDELFTTLSAEKQSRFRIISDDHNEVLMKRSSDRFVPLLLQYIDYGKLFDHIRFHVNMGKLRYLLKADKTCIDGQTRVRVIEQPLNGFGRLEEAETMRKQENGTFGNSGIRIRDFENMKRDDANPANYPYIVDTYTHYILENNKVEMFINDKEDSAPLLPVIEDDRYVVKTIPSCRMSTLEIPAMAFHMFLFGSKKTEKLIVDVHNRYKRLFQAMQKEEVTAENIASFGIAESDLPQKILDLISGNAHGKDVDAFIRLTVDDMLTDTERRIKRFKDDRKSIRSADNKMGKRGFKQISTGKLADFLAKDIVLFQPSVNDGENKITGLNYRIMQSAIAVYDSGDDYEAKQQFKLMFEKARLIGKGTTEPHPFLYKVFARSIPANAVEFYERYLIERKFYLTGLSNEIKKGNRVDVPFIRRDQNKWKTPAMKTLGRIYSEDLPVELPRQMFDNEIKSHLKSLPQMEGIDFNNANVTYLIAEYMKRVLDDDFQTFYQWNRNYRYMDMLKGEYDRKGSLQHCFTSVEEREGLWKERASRTERYRKQASNKIRSNRQMRNASSEEIETILDKRLSNSRNEYQKSEKVIRRYRVQDALLFLLAKKTLTELADFDGERFKLKEIMPDAEKGILSEIMPMSFTFEKGGKKYTITSEGMKLKNYGDFFVLASDKRIGNLLELVGSDIVSKEDSRGGGGSGGGGSTRVSKGEEDNMAIIKEFMRFKVHMEGSVNGHEFEIEGEGEGRPYEGTQTAKLKVTKGGPLPFAWDILSPQFMYGSKAYVKHPADIPDYLKLSFPEGFKWERVMNFEDGGVVTVTQDSSLQDGEFIYKVKLRGTNFPSDGPVMQKKTMGWEASSERMYPEDGALKGEIKQRLKLKDGGHYDAEVKTTYKAKKPVQLPGAYNVNIKLDITSHNEDYTIVEQYERAEGRHSTGGMDELYK

SEQ ID NO: 122 - protein, 1388 aa, Artificial Sequence
  chemically synthesized
MDYKDHDGDYKDHDIDYKDDDDKGGMSVLTPLLLRGLTGSARRLPVPRAKIHSLGDPMSVLTPLLLRGLTGSARRLPVPRAKIHSLGKLATMSVLTPLLLRGLTGSARRLPVPRAKIHSLGDPMSVLTPLLLRGLTGSARRLPVPRAKIHSLGKLGGNIPALVENQKKYFGTYSVMAMLNAQTVLDHIQKVADIEGEQNENNENLWFHPVMSHLYNAKNGYDKQPEKTMFIIERLQSYFPFLKIMAENQREYSNGKYKQNRVEVNSNDIFEVLKRAFGVLKMYRDLTNAYKTYEEKLNDGCEFLTSTEQPLSGMINNYYTVALRNMNERYGYKTEDLAFIQDKRFKFVKDAYGKKKSQVNTGFFLSLQDYNGDTQKKLHLSGVGIALLICLFLDKQYINIFLSRLPIFSSYNAQSEERRIIIRSFGINSIKLPKDRIHSEKSNKSVAMDMLNEVKRCPDELFTTLSAEKQSRFRIISDDHNEVLMKRSSDRFVPLLLQYIDYGKLFDHIRFHVNMGKLRYLLKADKTCIDGQTRVRVIEQPLNGFGRLEEAETMRKQENGTFGNSGIRIRDFENMKRDDANPANYPYIVDTYTHYILENNKVEMFINDKEDSAPLLPVIEDDRYVVKTIPSCRMSTLEIPAMAFHMFLFGSKKTEKLIVDVHNRYKRLFQAMQKEEVTAENIASFGIAESDLPQKILDLISGNAHGKDVDAFIRLTVDDMLTDTERRIKRFKDDRKSIRSADNKMGKRGFKQISTGKLADFLAKDIVLFQPSVNDGENKITGLNYRIMQSAIAVYDSGDDYEAKQQFKLMFEKARLIGKGTTEPHPFLYKVFARSIPANAVEFYERYLIERKFYLTGLSNEIKKGNRVDVPFIRRDQNKWKTPAMKTLGRIYSEDLPVELPRQMFDNEIKSHLKSLPQMEGIDFNNANVTYLIAEYMKRVLDDDFQTFYQWNRNYRYMDMLKGEYDRKGSLQHCFTSVEEREGLWKERASRTERYRKQASNKIRSNRQMRNASSEEIETILDKRLSNSRNEYQKSEKVIRRYRVQDALLFLLAKKTLTELADFDGERFKLKEIMPDAEKGILSEIMPMSFTFEKGGKKYTITSEGMKLKNYGDFFVLASDKRIGNLLELVGSDIVSKEDSRGGGGSGGGGSTRVSKGEEDNMAIIKEFMRFKVHMEGSVNGHEFEIEGEGEGRPYEGTQTAKLKVTKGGPLPFAWDILSPQFMYGSKAYVKHPADIPDYLKLSFPEGFKWERVMNFEDGGVVTVTQDSSLQDGEFIYKVKLRGTNFPSDGPVMQKKTMGWEASSERMYPEDGALKGEIKQRLKLKDGGHYDAEVKTTYKAKKPVQLPGAYNVNIKLDITSHNEDYTIVEQYERAEGRHSTGGMDELYK

SEQ ID NO: 123 - protein, 1279 aa, Artificial Sequence
  chemically synthesized
MDYKDHDGDYKDHDIDYKDDDDKGGMYRMQLLSCIALSLALVTNSLGGNIPALVENQKKYFGTYSVMAMLNAQTVLDHIQKVADIEGEQNENNENLWFHPVMSHLYNAKNGYDKQPEKTMFIIERLQSYFPFLKIMAENQREYSNGKYKQNRVEVNSNDIFEVLKRAFGVLKMYRDLTNAYKTYEEKLNDGCEFLTSTEQPLSGMINNYYTVALRNMNERYGYKTEDLAFIQDKRFKFVKDAYGKKKSQVNTGFFLSLQDYNGDTQKKLHLSGVGIALLICLFLDKQYINIFLSRLPIFSSYNAQSEERRIIIRSFGINSIKLPKDRIHSEKSNKSVAMDMLNEVKRCPDELFTTLSAEKQSRFRIISDDHNEVLMKRSSDRFVPLLLQYIDYGKLFDHIRFHVNMGKLRYLLKADKTCIDGQTRVRVIEQPLNGFGRLEEAETMRKQENGTFGNSGIRIRDFENMKRDDANPANYPYIVDTYTHYILENNKVEMFINDKEDSAPLLPVIEDDRYVVKTIPSCRMSTLEIPAMAFHMFLFGSKKTEKLIVDVHNRYKRLFQAMQKEEVTAENIASFGIAESDLPQKILDLISGNAHGKDVDAFIRLTVDDMLTDTERRIKRFKDDRKSIRSADNKMGKRGFKQISTGKLADFLAKDIVLFQPSVNDGENKITGLNYRIMQSAIAVYDSGDDYEAKQQFKLMFEKARLIGKGTTEPHPFLYKVFARSIPANAVEFYERYLIERKFYLTGLSNEIKKGNRVDVPFIRRDQNKWKTPAMKTLGRIYSEDLPVELPRQMFDNEIKSHLKSLPQMEGIDFNNANVTYLIAEYMKRVLDDDFQTFYQWNRNYRYMDMLKGEYDRKGSLQHCFTSVEEREGLWKERASRTERYRKQASNKIRSNRQMRNASSEEIETILDKRLSNSRNEYQKSEKVIRRYRVQDALLFLLAKKTLTELADFDGERFKLKEIMPDAEKGILSEIMPMSFTFEKGGKKYTITSEGMKLKNYGDFFVLASDKRIGNLLELVGSDIVSKEDSRGGGGSGGGGSTRVSKGEEDNMAIIKEFMRFKVHMEGSVNGHEFEIEGEGEGRPYEGTQTAKLKVTKGGPLPFAWDILSPQFMYGSKAYVKHPADIPDYLKLSFPEGFKWERVMNFEDGGVVTVTQDSSLQDGEFIYKVKLRGTNFPSDGPVMQKKTMGWEASSERMYPEDGALKGEIKQRLKLKDGGHYDAEVKTTYKAKKPVQLPGAYNVNIKLDITSHNEDYTIVEQYERAEGRHSTGGMDELYK

SEQ ID NO: 124 - protein, 1301 aa, Artificial Sequence
  chemically synthesized
MDYKDHDGDYKDHDIDYKDDDDKGGMGCCFSKTAAKGEAAAERPGEAAVASSPSKANGQENGHVKVGSGGNIPALVENQKKYFGTYSVMAMLNAQTVLDHIQKVADIEGEQNENNENLWFHPVMSHLYNAKNGYDKQPEKTMFIIERLQSYFPFLKIMAENQREYSNGKYKQNRVEVNSNDIFEVLKRAFGVLKMYRDLTNAYKTYEEKLNDGCEFLTSTEQPLSGMINNYYTVALRNMNERYGYKTEDLAFIQDKRFKFVKDAYGKKKSQVNTGFFLSLQDYNGDTQKKLHLSGVGIALLICLFLDKQYINIFLSRLPIFSSYNAQSEERRIIIRSFGINSIKLPKDRIHSEKSNKSVAMDMLNEVKRCPDELFTTLSAEKQSRFRIISDDHNEVLMKRSSDRFVPLLLQYIDYGKLFDHIRFHVNMGKLRYLLKADKTCIDGQTRVRVIEQPLNGFGRLEEAETMRKQENGTFGNSGIRIRDFENMKRDDANPANYPYIVDTYTHYILENNKVEMFINDKEDSAPLLPVIEDDRYVVKTIPSCRMSTLEIPAMAFHMFLFGSKKTEKLIVDVHNRYKRLFQAMQKEEVTAENIASFGIAESDLPQKILDLISGNAHGKDVDAFIRLTVDDMLTDTERRIKRFKDDRKSIRSADNKMGKRGFKQISTGKLADFLAKDIVLFQPSVNDGENKITGLNYRIMQSAIAVYDSGDDYEAKQQFKLMFEKARLIGKGTTEPHPFLYKVFARSIPANAVEFYERYLIERKFYLTGLSNEIKKGNRVDVPFIRRDQNKWKTPAMKTLGRIYSEDLPVELPRQMFDNEIKSHLKSLPQMEGIDFNNANVTYLIAEYMKRVLDDDFQTFYQWNRNYRYMDMLKGEYDRKGSLQHCFTSVEEREGLWKERASRTERYRKQASNKIRSNRQMRNASSEEIETILDKRLSNSRNEYQKSEKVIRRYRVQDALLFLLAKKTLTELADFDGERFKLKEIMPDAEKGILSEIMPMSFTFEKGGKKYTITSEGMKLKNYGDFFVLASDKRIGNLLELVGSDIVSKEDSRGGGGSGGGGSTRVSKGEEDNMAIIKEFMRFKVHMEGSVNGHEFEIEGEGEGRPYEGTQTAKLKVTKGGPLPFAWDILSPQFMYGSKAYVKHPADIPDYLKLSFPEGFKWERVMNFEDGGVVTVTQDSSLQDGEFIYKVKLRGTNFPSDGPVMQKKTMGWEASSERMYPEDGALKGEIKQRLKLKDGGHYDAEVKTTYKAKKPVQLPGAYNVNIKLDITSHNEDYTIVEQYERAEGRHSTGGMDELYK

SEQ ID NO: 125 - protein, 1275 aa, Artificial Sequence
  chemically synthesized
MDYKDHDGDYKDHDIDYKDDDDKGGMLLPVPLLLGLLGAAADGGNIPALVENQKKYFGTYSVMAMLNAQTVLDHIQKVADIEGEQNENNENLWFHPVMSHLYNAKNGYDKQPEKTMFIIERLQSYFPFLKIMAENQREYSNGKYKQNRVEVNSNDIFEVLKRAFGVLKMYRDLTNAYKTYEEKLNDGCEFLTSTEQPLSGMINNYYTVALRNMNERYGYKTEDLAFIQDKRFKFVKDAYGKKKSQVNTGFFLSLQDYNGDTQKKLHLSGVGIALLICLFLDKQYINIFLSRLPIFSSYNAQSEERRIIIRSFGINSIKLPKDRIHSEKSNKSVAMDMLNEVKRCPDELFTTLSAEKQSRFRIISDDHNEVLMKRSSDRFVPLLLQYIDYGKLFDHIRFHVNMGKLRYLLKADKTCIDGQTRVRVIEQPLNGFGRLEEAETMRKQENGTFGNSGIRIRDFENMKRDDANPANYPYIVDTYTHYILENNKVEMFINDKEDSAPLLPVIEDDRYVVKTIPSCRMSTLEIPAMAFHMFLFGSKKTEKLIVDVHNRYKRLFQAMQKEEVTAENIASFGIAESDLPQKILDLISGNAHGKDVDAFIRLTVDDMLTDTERRIKRFKDDRKSIRSADNKMGKRGFKQISTGKLADFLAKDIVLFQPSVNDGENKITGLNYRIMQSAIAVYDSGDDYEAKQQFKLMFEKARLIGKGTTEPHPFLYKVFARSIPANAVEFYERYLIERKFYLTGLSNEIKKGNRVDVPFIRRDQNKWKTPAMKTLGRIYSEDLPVELPRQMFDNEIKSHLKSLPQMEGIDFNNANVTYLIAEYMKRVLDDDFQTFYQWNRNYRYMDMLKGEYDRKGSLQHCFTSVEEREGLWKERASRTERYRKQASNKIRSNRQMRNASSEEIETILDKRLSNSRNEYQKSEKVIRRYRVQDALLFLLAKKTLTELADFDGERFKLKEIMPDAEKGILSEIMPMSFTFEKGGKKYTITSEGMKLKNYGDFFVLASDKRIGNLLELVGSDIVSKEDSRGGGGSGGGGSTRVSKGEEDNMAIIKEFMRFKVHMEGSVNGHEFEIEGEGEGRPYEGTQTAKLKVTKGGPLPFAWDILSPQFMYGSKAYVKHPADIPDYLKLSFPEGFKWERVMNFEDGGVVTVTQDSSLQDGEFIYKVKLRGTNFPSDGPVMQKKTMGWEASSERMYPEDGALKGEIKQRLKLKDGGHYDAEVKTTYKAKKPVQLPGAYNVNIKLDITSHNEDYTIVEQYERAEGRHSTGGMDELYK

SEQ ID NO: 126 - protein, 1267 aa, Artificial Sequence
  chemically synthesized
MDYKDHDGDYKDHDIDYKDDDDKGGGITLGKDELGGNIPALVENQKKYFGTYSVMAMLNAQTVLDHIQKVADIEGEQNENNENLWFHPVMSHLYNAKNGYDKQPEKTMFIIERLQSYFPFLKIMAENQREYSNGKYKQNRVEVNSNDIFEVLKRAFGVLKMYRDLTNAYKTYEEKLNDGCEFLTSTEQPLSGMINNYYTVALRNMNERYGYKTEDLAFIQDKRFKFVKDAYGKKKSQVNTGFFLSLQDYNGDTQKKLHLSGVGIALLICLFLDKQYINIFLSRLPIFSSYNAQSEERRIIIRSFGINSIKLPKDRIHSEKSNKSVAMDMLNEVKRCPDELFTTLSAEKQSRFRIISDDHNEVLMKRSSDRFVPLLLQYIDYGKLFDHIRFHVNMGKLRYLLKADKTCIDGQTRVRVIEQPLNGFGRLEEAETMRKQENGTFGNSGIRIRDFENMKRDDANPANYPYIVDTYTHYILENNKVEMFINDKEDSAPLLPVIEDDRYVVKTIPSCRMSTLEIPAMAFHMFLFGSKKTEKLIVDVHNRYKRLFQAMQKEEVTAENIASFGIAESDLPQKILDLISGNAHGKDVDAFIRLTVDDMLTDTERRIKRFKDDRKSIRSADNKMGKRGFKQISTGKLADFLAKDIVLFQPSVNDGENKITGLNYRIMQSAIAVYDSGDDYEAKQQFKLMFEKARLIGKGTTEPHPFLYKVFARSIPANAVEFYERYLIERKFYLTGLSNEIKKGNRVDVPFIRRDQNKWKTPAMKTLGRIYSEDLPVELPRQMFDNEIKSHLKSLPQMEGIDFNNANVTYLIAEYMKRVLDDDFQTFYQWNRNYRYMDMLKGEYDRKGSLQHCFTSVEEREGLWKERASRTERYRKQASNKIRSNRQMRNASSEEIETILDKRLSNSRNEYQKSEKVIRRYRVQDALLFLLAKKTLTELADFDGERFKLKEIMPDAEKGILSEIMPMSFTFEKGGKKYTITSEGMKLKNYGDFFVLASDKRIGNLLELVGSDIVSKEDSRGGGGSGGGGSTRVSKGEEDNMAIIKEFMRFKVHMEGSVNGHEFEIEGEGEGRPYEGTQTAKLKVTKGGPLPFAWDILSPQFMYGSKAYVKHPADIPDYLKLSFPEGFKWERVMNFEDGGVVTVTQDSSLQDGEFIYKVKLRGTNFPSDGPVMQKKTMGWEASSERMYPEDGALKGEIKQRLKLKDGGHYDAEVKTTYKAKKPVQLPGAYNVNIKLDITSHNEDYTIVEQYERAEGRHSTGGMDELYK

SEQ ID NO: 127 - protein, 1261 aa, Artificial Sequence
  chemically synthesized
MDYKDHDGDYKDHDIDYKDDDDKGGSKLGGNIPALVENQKKYFGTYSVMAMLNAQTVLDHIQKVADIEGEQNENNENLWFHPVMSHLYNAKNGYDKQPEKTMFIIERLQSYFPFLKIMAENQREYSNGKYKQNRVEVNSNDIFEVLKRAFGVLKMYRDLTNAYKTYEEKLNDGCEFLTSTEQPLSGMINNYYTVALRNMNERYGYKTEDLAFIQDKRFKFVKDAYGKKKSQVNTGFFLSLQDYNGDTQKKLHLSGVGIALLICLFLDKQYINIFLSRLPIFSSYNAQSEERRIIIRSFGINSIKLPKDRIHSEKSNKSVAMDMLNEVKRCPDELFTTLSAEKQSRFRIISDDHNEVLMKRSSDRFVPLLLQYIDYGKLFDHIRFHVNMGKLRYLLKADKTCIDGQTRVRVIEQPLNGFGRLEEAETMRKQENGTFGNSGIRIRDFENMKRDDANPANYPYIVDTYTHYILENNKVEMFINDKEDSAPLLPVIEDDRYVVKTIPSCRMSTLEIPAMAFHMFLFGSKKTEKLIVDVHNRYKRLFQAMQKEEVTAENIASFGIAESDLPQKILDLISGNAHGKDVDAFIRLTVDDMLTDTERRIKRFKDDRKSIRSADNKMGKRGFKQISTGKLADFLAKDIVLFQPSVNDGENKITGLNYRIMQSAIAVYDSGDDYEAKQQFKLMFEKARLIGKGTTEPHPFLYKVFARSIPANAVEFYERYLIERKFYLTGLSNEIKKGNRVDVPFIRRDQNKWKTPAMKTLGRIYSEDLPVELPRQMFDNEIKSHLKSLPQMEGIDFNNANVTYLIAEYMKRVLDDDFQTFYQWNRNYRYMDMLKGEYDRKGSLQHCFTSVEEREGLWKERASRTERYRKQASNKIRSNRQMRNASSEEIETILDKRLSNSRNEYQKSEKVIRRYRVQDALLFLLAKKTLTELADFDGERFKLKEIMPDAEKGILSEIMPMSFTFEKGGKKYTITSEGMKLKNYGDFFVLASDKRIGNLLELVGSDIVSKEDSRGGGGSGGGGSTRVSKGEEDNMAIIKEFMRFKVHMEGSVNGHEFEIEGEGEGRPYEGTQTAKLKVTKGGPLPFAWDILSPQFMYGSKAYVKHPADIPDYLKLSFPEGFKWERVMNFEDGGVVTVTQDSSLQDGEFIYKVKLRGTNFPSDGPVMQKKTMGWEASSERMYPEDGALKGEIKQRLKLKDGGHYDAEVKTTYKAKKPVQLPGAYNVNIKLDITSHNEDYTIVEQYERAEGRHSTGGMDELYK

SEQ ID NO: 128 - protein, 1313 aa, Artificial Sequence
  chemically synthesized
MDYKDHDGDYKDHDIDYKDDDDKGGNSKKRSLEDNETEIKVSRDTWNTKNMRSLEPPRSKKRIHGGNIPALVENQKKYFGTYSVMAMLNAQTVLDHIQKVADIEGEQNENNENLWFHPVMSHLYNAKNGYDKQPEKTMFIIERLQSYFPFLKIMAENQREYSNGKYKQNRVEVNSNDIFEVLKRAFGVLKMYRDLTNAYKTYEEKLNDGCEFLTSTEQPLSGMINNYYTVALRNMNERYGYKTEDLAFIQDKRFKFVKDAYGKKKSQVNTGFFLSLQDYNGDTQKKLHLSGVGIALLICLFLDKQYINIFLSRLPIFSSYNAQSEERRIIIRSFGINSIKLPKDRIHSEKSNKSVAMDMLNEVKRCPDELFTTLSAEKQSRFRIISDDHNEVLMKRSSDRFVPLLLQYIDYGKLFDHIRFHVNMGKLRYLLKADKTCIDGQTRVRVIEQPLNGFGRLEEAETMRKQENGTFGNSGIRIRDFENMKRDDANPANYPYIVDTYTHYILENNKVEMFINDKEDSAPLLPVIEDDRYVVKTIPSCRMSTLEIPAMAFHMFLFGSKKTEKLIVDVHNRYKRLFQAMQKEEVTAENIASFGIAESDLPQKILDLISGNAHGKDVDAFIRLTVDDMLTDTERRIKRFKDDRKSIRSADNKMGKRGFKQISTGKLADFLAKDIVLFQPSVNDGENKITGLNYRIMQSAIAVYDSGDDYEAKQQFKLMFEKARLIGKGTTEPHPFLYKVFARSIPANAVEFYERYLIERKFYLTGLSNEIKKGNRVDVPFIRRDQNKWKTPAMKTLGRIYSEDLPVELPRQMFDNEIKSHLKSLPQMEGIDFNNANVTYLIAEYMKRVLDDDFQTFYQWNRNYRYMDMLKGEYDRKGSLQHCFTSVEEREGLWKERASRTERYRKQASNKIRSNRQMRNASSEEIETILDKRLSNSRNEYQKSEKVIRRYRVQDALLFLLAKKTLTELADFDGERFKLKEIMPDAEKGILSEIMPMSFTFEKGGKKYTITSEGMKLKNYGDFFVLASDKRIGNLLELVGSDIVSKEDIMEEFNKYDQCRPEISSIVFNLEKWAFDTYPELSARVDREEKVDFKSILKILLNNKNINKEQSDILRKIRNAFDANNYPDKGVVEIKALPEIAMSIKKAFGEYAIMKSRGGGGSGGGGSTRGGRDHMVLHEYVNAAGITGGSGGRDHMVLHEYVNAAGITGGSGGRDHMVLHEYVNAAGITGGSGGRDHMVLHEYVNAAGITGGSGGRDHMVLHEYVNAAGITGGSGGRDHMVLHEYVNAAGITGGSGGRDHMVLHEYVNAAGIT

SEQ ID NO: 129 - protein, 1313 aa, Artificial Sequence
  chemically synthesized
MDYKDHDGDYKDHDIDYKDDDDKGGKSKKRSLEDNETEIEVSRDTWNNKNMRSLEPPRSKKRINGGNIPALVENQKKYFGTYSVMAMLNAQTVLDHIQKVADIEGEQNENNENLWFHPVMSHLYNAKNGYDKQPEKTMFIIERLQSYFPFLKIMAENQREYSNGKYKQNRVEVNSNDIFEVLKRAFGVLKMYRDLTNAYKTYEEKLNDGCEFLTSTEQPLSGMINNYYTVALRNMNERYGYKTEDLAFIQDKRFKFVKDAYGKKKSQVNTGFFLSLQDYNGDTQKKLHLSGVGIALLICLFLDKQYINIFLSRLPIFSSYNAQSEERRIIIRSFGINSIKLPKDRIHSEKSNKSVAMDMLNEVKRCPDELFTTLSAEKQSRFRIISDDHNEVLMKRSSDRFVPLLLQYIDYGKLFDHIRFHVNMGKLRYLLKADKTCIDGQTRVRVIEQPLNGFGRLEEAETMRKQENGTFGNSGIRIRDFENMKRDDANPANYPYIVDTYTHYILENNKVEMFINDKEDSAPLLPVIEDDRYVVKTIPSCRMSTLEIPAMAFHMFLFGSKKTEKLIVDVHNRYKRLFQAMQKEEVTAENIASFGIAESDLPQKILDLISGNAHGKDVDAFIRLTVDDMLTDTERRIKRFKDDRKSIRSADNKMGKRGFKQISTGKLADFLAKDIVLFQPSVNDGENKITGLNYRIMQSAIAVYDSGDDYEAKQQFKLMFEKARLIGKGTTEPHPFLYKVFARSIPANAVEFYERYLIERKFYLTGLSNEIKKGNRVDVPFIRRDQNKWKTPAMKTLGRIYSEDLPVELPRQMFDNEIKSHLKSLPQMEGIDFNNANVTYLIAEYMKRVLDDDFQTFYQWNRNYRYMDMLKGEYDRKGSLQHCFTSVEEREGLWKERASRTERYRKQASNKIRSNRQMRNASSEEIETILDKRLSNSRNEYQKSEKVIRRYRVQDALLFLLAKKTLTELADFDGERFKLKEIMPDAEKGILSEIMPMSFTFEKGGKKYTITSEGMKLKNYGDFFVLASDKRIGNLLELVGSDIVSKEDIMEEFNKYDQCRPEISSIVFNLEKWAFDTYPELSARVDREEKVDFKSILKILLNNKNINKEQSDILRKIRNAFDANNYPDKGVVEIKALPEIAMSIKKAFGEYAIMKSRGGGGSGGGGSTRGGRDHMVLHEYVNAAGITGGSGGRDHMVLHEYVNAAGITGGSGGRDHMVLHEYVNAAGITGGSGGRDHMVLHEYVNAAGITGGSGGRDHMVLHEYVNAAGITGGSGGRDHMVLHEYVNAAGITGGSGGRDHMVLHEYVNAAGIT

SEQ ID NO: 130 - protein, 1285 aa, Artificial Sequence
  chemically synthesized
MDYKDHDGDYKDHDIDYKDDDDKGGLQLPPLERLTLGGNIPALVENQKKYFGTYSVMAMLNAQTVLDHIQKVADIEGEQNENNENLWFHPVMSHLYNAKNGYDKQPEKTMFIIERLQSYFPFLKIMAENQREYSNGKYKQNRVEVNSNDIFEVLKRAFGVLKMYRDLTNAYKTYEEKLNDGCEFLTSTEQPLSGMINNYYTVALRNMNERYGYKTEDLAFIQDKRFKFVKDAYGKKKSQVNTGFFLSLQDYNGDTQKKLHLSGVGIALLICLFLDKQYINIFLSRLPIFSSYNAQSEERRIIIRSFGINSIKLPKDRIHSEKSNKSVAMDMLNEVKRCPDELFTTLSAEKQSRFRIISDDHNEVLMKRSSDRFVPLLLQYIDYGKLFDHIRFHVNMGKLRYLLKADKTCIDGQTRVRVIEQPLNGFGRLEEAETMRKQENGTFGNSGIRIRDFENMKRDDANPANYPYIVDTYTHYILENNKVEMFINDKEDSAPLLPVIEDDRYVVKTIPSCRMSTLEIPAMAFHMFLFGSKKTEKLIVDVHNRYKRLFQAMQKEEVTAENIASFGIAESDLPQKILDLISGNAHGKDVDAFIRLTVDDMLTDTERRIKRFKDDRKSIRSADNKMGKRGFKQISTGKLADFLAKDIVLFQPSVNDGENKITGLNYRIMQSAIAVYDSGDDYEAKQQFKLMFEKARLIGKGTTEPHPFLYKVFARSIPANAVEFYERYLIERKFYLTGLSNEIKKGNRVDVPFIRRDQNKWKTPAMKTLGRIYSEDLPVELPRQMFDNEIKSHLKSLPQMEGIDFNNANVTYLIAEYMKRVLDDDFQTFYQWNRNYRYMDMLKGEYDRKGSLQHCFTSVEEREGLWKERASRTERYRKQASNKIRSNRQMRNASSEEIETILDKRLSNSRNEYQKSEKVIRRYRVQDALLFLLAKKTLTELADFDGERFKLKEIMPDAEKGILSEIMPMSFTFEKGGKKYTITSEGMKLKNYGDFFVLASDKRIGNLLELVGSDIVSKEDIMEEFNKYDQCRPEISSIVFNLEKWAFDTYPELSARVDREEKVDFKSILKILLNNKNINKEQSDILRKIRNAFDANNYPDKGVVEIKALPEIAMSIKKAFGEYAIMKSRGGGGSGGGGSTRGGRDHMVLHEYVNAAGITGGSGGRDHMVLHEYVNAAGITGGSGGRDHMVLHEYVNAAGITGGSGGRDHMVLHEYVNAAGITGGSGGRDHMVLHEYVNAAGITGGSGGRDHMVLHEYVNAAGITGGSGGRDHMVLHEYVNAAGIT

SEQ ID NO: 131 - protein, 1290 aa, Artificial Sequence
  chemically synthesized
MDYKDHDGDYKDHDIDYKDDDDKGGGSLQLPPLERLTLGSSGGNIPALVENQKKYFGTYSVMAMLNAQTVLDHIQKVADIEGEQNENNENLWFHPVMSHLYNAKNGYDKQPEKTMFIIERLQSYFPFLKIMAENQREYSNGKYKQNRVEVNSNDIFEVLKRAFGVLKMYRDLTNAYKTYEEKLNDGCEFLTSTEQPLSGMINNYYTVALRNMNERYGYKTEDLAFIQDKRFKFVKDAYGKKKSQVNTGFFLSLQDYNGDTQKKLHLSGVGIALLICLFLDKQYINIFLSRLPIFSSYNAQSEERRIIIRSFGINSIKLPKDRIHSEKSNKSVAMDMLNEVKRCPDELFTTLSAEKQSRFRIISDDHNEVLMKRSSDRFVPLLLQYIDYGKLFDHIRFHVNMGKLRYLLKADKTCIDGQTRVRVIEQPLNGFGRLEEAETMRKQENGTFGNSGIRIRDFENMKRDDANPANYPYIVDTYTHYILENNKVEMFINDKEDSAPLLPVIEDDRYVVKTIPSCRMSTLEIPAMAFHMFLFGSKKTEKLIVDVHNRYKRLFQAMQKEEVTAENIASFGIAESDLPQKILDLISGNAHGKDVDAFIRLTVDDMLTDTERRIKRFKDDRKSIRSADNKMGKRGFKQISTGKLADFLAKDIVLFQPSVNDGENKITGLNYRIMQSAIAVYDSGDDYEAKQQFKLMFEKARLIGKGTTEPHPFLYKVFARSIPANAVEFYERYLIERKFYLTGLSNEIKKGNRVDVPFIRRDQNKWKTPAMKTLGRIYSEDLPVELPRQMFDNEIKSHLKSLPQMEGIDFNNANVTYLIAEYMKRVLDDDFQTFYQWNRNYRYMDMLKGEYDRKGSLQHCFTSVEEREGLWKERASRTERYRKQASNKIRSNRQMRNASSEEIETILDKRLSNSRNEYQKSEKVIRRYRVQDALLFLLAKKTLTELADFDGERFKLKEIMPDAEKGILSEIMPMSFTFEKGGKKYTITSEGMKLKNYGDFFVLASDKRIGNLLELVGSDIVSKEDIMEEFNKYDQCRPEISSIVFNLEKWAFDTYPELSARVDREEKVDFKSILKILLNNKNINKEQSDILRKIRNAFDANNYPDKGVVEIKALPEIAMSIKKAFGEYAIMKSRGGGGSGGGGSTRGGRDHMVLHEYVNAAGITGGSGGRDHMVLHEYVNAAGITGGSGGRDHMVLHEYVNAAGITGGSGGRDHMVLHEYVNAAGITGGSGGRDHMVLHEYVNAAGITGGSGGRDHMVLHEYVNAAGITGGSGGRDHMVLHEYVNAAGIT

SEQ ID NO: 132 - protein, 1306 aa, Artificial Sequence
  chemically synthesized
MDYKDHDGDYKDHDIDYKDDDDKGGMSVLTPLLLRGLTGSARRLPVPRAKIHSLGDPGGNIPALVENQKKYFGTYSVMAMLNAQTVLDHIQKVADIEGEQNENNENLWFHPVMSHLYNAKNGYDKQPEKTMFIIERLQSYFPFLKIMAENQREYSNGKYKQNRVEVNSNDIFEVLKRAFGVLKMYRDLTNAYKTYEEKLNDGCEFLTSTEQPLSGMINNYYTVALRNMNERYGYKTEDLAFIQDKRFKFVKDAYGKKKSQVNTGFFLSLQDYNGDTQKKLHLSGVGIALLICLFLDKQYINIFLSRLPIFSSYNAQSEERRIIIRSFGINSIKLPKDRIHSEKSNKSVAMDMLNEVKRCPDELFTTLSAEKQSRFRIISDDHNEVLMKRSSDRFVPLLLQYIDYGKLFDHIRFHVNMGKLRYLLKADKTCIDGQTRVRVIEQPLNGFGRLEEAETMRKQENGTFGNSGIRIRDFENMKRDDANPANYPYIVDTYTHYILENNKVEMFINDKEDSAPLLPVIEDDRYVVKTIPSCRMSTLEIPAMAFHMFLFGSKKTEKLIVDVHNRYKRLFQAMQKEEVTAENIASFGIAESDLPQKILDLISGNAHGKDVDAFIRLTVDDMLTDTERRIKRFKDDRKSIRSADNKMGKRGFKQISTGKLADFLAKDIVLFQPSVNDGENKITGLNYRIMQSAIAVYDSGDDYEAKQQFKLMFEKARLIGKGTTEPHPFLYKVFARSIPANAVEFYERYLIERKFYLTGLSNEIKKGNRVDVPFIRRDQNKWKTPAMKTLGRIYSEDLPVELPRQMFDNEIKSHLKSLPQMEGIDFNNANVTYLIAEYMKRVLDDDFQTFYQWNRNYRYMDMLKGEYDRKGSLQHCFTSVEEREGLWKERASRTERYRKQASNKIRSNRQMRNASSEEIETILDKRLSNSRNEYQKSEKVIRRYRVQDALLFLLAKKTLTELADFDGERFKLKEIMPDAEKGILSEIMPMSFTFEKGGKKYTITSEGMKLKNYGDFFVLASDKRIGNLLELVGSDIVSKEDIMEEFNKYDQCRPEISSIVFNLEKWAFDTYPELSARVDREEKVDFKSILKILLNNKNINKEQSDILRKIRNAFDANNYPDKGVVEIKALPEIAMSIKKAFGEYAIMKSRGGGGSGGGGSTRGGRDHMVLHEYVNAAGITGGSGGRDHMVLHEYVNAAGITGGSGGRDHMVLHEYVNAAGITGGSGGRDHMVLHEYVNAAGITGGSGGRDHMVLHEYVNAAGITGGSGGRDHMVLHEYVNAAGITGGSGGRDHMVLHEYVNAAGIT

SEQ ID NO: 133 - protein, 1404 aa, Artificial Sequence
  chemically synthesized
MDYKDHDGDYKDHDIDYKDDDDKGGMSVLTPLLLRGLTGSARRLPVPRAKIHSLGDPMSVLTPLLLRGLTGSARRLPVPRAKIHSLGKLATMSVLTPLLLRGLTGSARRLPVPRAKIHSLGDPMSVLTPLLLRGLTGSARRLPVPRAKIHSLGKLGGNIPALVENQKKYFGTYSVMAMLNAQTVLDHIQKVADIEGEQNENNENLWFHPVMSHLYNAKNGYDKQPEKTMFIIERLQSYFPFLKIMAENQREYSNGKYKQNRVEVNSNDIFEVLKRAFGVLKMYRDLTNAYKTYEEKLNDGCEFLTSTEQPLSGMINNYYTVALRNMNERYGYKTEDLAFIQDKRFKFVKDAYGKKKSQVNTGFFLSLQDYNGDTQKKLHLSGVGIALLICLFLDKQYINIFLSRLPIFSSYNAQSEERRIIIRSFGINSIKLPKDRIHSEKSNKSVAMDMLNEVKRCPDELFTTLSAEKQSRFRIISDDHNEVLMKRSSDRFVPLLLQYIDYGKLFDHIRFHVNMGKLRYLLKADKTCIDGQTRVRVIEQPLNGFGRLEEAETMRKQENGTFGNSGIRIRDFENMKRDDANPANYPYIVDTYTHYILENNKVEMFINDKEDSAPLLPVIEDDRYVVKTIPSCRMSTLEIPAMAFHMFLFGSKKTEKLIVDVHNRYKRLFQAMQKEEVTAENIASFGIAESDLPQKILDLISGNAHGKDVDAFIRLTVDDMLTDTERRIKRFKDDRKSIRSADNKMGKRGFKQISTGKLADFLAKDIVLFQPSVNDGENKITGLNYRIMQSAIAVYDSGDDYEAKQQFKLMFEKARLIGKGTTEPHPFLYKVFARSIPANAVEFYERYLIERKFYLTGLSNEIKKGNRVDVPFIRRDQNKWKTPAMKTLGRIYSEDLPVELPRQMFDNEIKSHLKSLPQMEGIDFNNANVTYLIAEYMKRVLDDDFQTFYQWNRNYRYMDMLKGEYDRKGSLQHCFTSVEEREGLWKERASRTERYRKQASNKIRSNRQMRNASSEEIETILDKRLSNSRNEYQKSEKVIRRYRVQDALLFLLAKKTLTELADFDGERFKLKEIMPDAEKGILSEIMPMSFTFEKGGKKYTITSEGMKLKNYGDFFVLASDKRIGNLLELVGSDIVSKEDIMEEFNKYDQCRPEISSIVFNLEKWAFDTYPELSARVDREEKVDFKSILKILLNNKNINKEQSDILRKIRNAFDANNYPDKGVVEIKALPEIAMSIKKAFGEYAIMKSRGGGGSGGGGSTRGGRDHMVLHEYVNAAGITGGSGGRDHMVLHEYVNAAGITGGSGGRDHMVLHEYVNAAGITGGSGGRDHMVLHEYVNAAGITGGSGGRDHMVLHEYVNAAGITGGSGGRDHMVLHEYVNAAGITGGSGGRDHMVLHEYVNAAGIT

SEQ ID NO: 134 - protein, 1295 aa, Artificial Sequence
  chemically synthesized
MDYKDHDGDYKDHDIDYKDDDDKGGMYRMQLLSCIALSLALVTNSLGGNIPALVENQKKYFGTYSVMAMLNAQTVLDHIQKVADIEGEQNENNENLWFHPVMSHLYNAKNGYDKQPEKTMFIIERLQSYFPFLKIMAENQREYSNGKYKQNRVEVNSNDIFEVLKRAFGVLKMYRDLTNAYKTYEEKLNDGCEFLTSTEQPLSGMINNYYTVALRNMNERYGYKTEDLAFIQDKRFKFVKDAYGKKKSQVNTGFFLSLQDYNGDTQKKLHLSGVGIALLICLFLDKQYINIFLSRLPIFSSYNAQSEERRIIIRSFGINSIKLPKDRIHSEKSNKSVAMDMLNEVKRCPDELFTTLSAEKQSRFRIISDDHNEVLMKRSSDRFVPLLLQYIDYGKLFDHIRFHVNMGKLRYLLKADKTCIDGQTRVRVIEQPLNGFGRLEEAETMRKQENGTFGNSGIRIRDFENMKRDDANPANYPYIVDTYTHYILENNKVEMFINDKEDSAPLLPVIEDDRYVVKTIPSCRMSTLEIPAMAFHMFLFGSKKTEKLIVDVHNRYKRLFQAMQKEEVTAENIASFGIAESDLPQKILDLISGNAHGKDVDAFIRLTVDDMLTDTERRIKRFKDDRKSIRSADNKMGKRGFKQISTGKLADFLAKDIVLFQPSVNDGENKITGLNYRIMQSAIAVYDSGDDYEAKQQFKLMFEKARLIGKGTTEPHPFLYKVFARSIPANAVEFYERYLIERKFYLTGLSNEIKKGNRVDVPFIRRDQNKWKTPAMKTLGRIYSEDLPVELPRQMFDNEIKSHLKSLPQMEGIDFNNANVTYLIAEYMKRVLDDDFQTFYQWNRNYRYMDMLKGEYDRKGSLQHCFTSVEEREGLWKERASRTERYRKQASNKIRSNRQMRNASSEEIETILDKRLSNSRNEYQKSEKVIRRYRVQDALLFLLAKKTLTELADFDGERFKLKEIMPDAEKGILSEIMPMSFTFEKGGKKYTITSEGMKLKNYGDFFVLASDKRIGNLLELVGSDIVSKEDIMEEFNKYDQCRPEISSIVFNLEKWAFDTYPELSARVDREEKVDFKSILKILLNNKNINKEQSDILRKIRNAFDANNYPDKGVVEIKALPEIAMSIKKAFGEYAIMKSRGGGGSGGGGSTRGGRDHMVLHEYVNAAGITGGSGGRDHMVLHEYVNAAGITGGSGGRDHMVLHEYVNAAGITGGSGGRDHMVLHEYVNAAGITGGSGGRDHMVLHEYVNAAGITGGSGGRDHMVLHEYVNAAGITGGSGGRDHMVLHEYVNAAGIT

SEQ ID NO: 135 - protein, 1317 aa, Artificial Sequence
  chemically synthesized
MDYKDHDGDYKDHDIDYKDDDDKGGMGCCFSKTAAKGEAAAERPGEAAVASSPSKANGQENGHVKVGSGGNIPALVENQKKYFGTYSVMAMLNAQTVLDHIQKVADIEGEQNENNENLWFHPVMSHLYNAKNGYDKQPEKTMFIIERLQSYFPFLKIMAENQREYSNGKYKQNRVEVNSNDIFEVLKRAFGVLKMYRDLTNAYKTYEEKLNDGCEFLTSTEQPLSGMINNYYTVALRNMNERYGYKTEDLAFIQDKRFKFVKDAYGKKKSQVNTGFFLSLQDYNGDTQKKLHLSGVGIALLICLFLDKQYINIFLSRLPIFSSYNAQSEERRIIIRSFGINSIKLPKDRIHSEKSNKSVAMDMLNEVKRCPDELFTTLSAEKQSRFRIISDDHNEVLMKRSSDRFVPLLLQYIDYGKLFDHIRFHVNMGKLRYLLKADKTCIDGQTRVRVIEQPLNGFGRLEEAETMRKQENGTFGNSGIRIRDFENMKRDDANPANYPYIVDTYTHYILENNKVEMFINDKEDSAPLLPVIEDDRYVVKTIPSCRMSTLEIPAMAFHMFLFGSKKTEKLIVDVHNRYKRLFQAMQKEEVTAENIASFGIAESDLPQKILDLISGNAHGKDVDAFIRLTVDDMLTDTERRIKRFKDDRKSIRSADNKMGKRGFKQISTGKLADFLAKDIVLFQPSVNDGENKITGLNYRIMQSAIAVYDSGDDYEAKQQFKLMFEKARLIGKGTTEPHPFLYKVFARSIPANAVEFYERYLIERKFYLTGLSNEIKKGNRVDVPFIRRDQNKWKTPAMKTLGRIYSEDLPVELPRQMFDNEIKSHLKSLPQMEGIDFNNANVTYLIAEYMKRVLDDDFQTFYQWNRNYRYMDMLKGEYDRKGSLQHCFTSVEEREGLWKERASRTERYRKQASNKIRSNRQMRNASSEEIETILDKRLSNSRNEYQKSEKVIRRYRVQDALLFLLAKKTLTELADFDGERFKLKEIMPDAEKGILSEIMPMSFTFEKGGKKYTITSEGMKLKNYGDFFVLASDKRIGNLLELVGSDIVSKEDIMEEFNKYDQCRPEISSIVFNLEKWAFDTYPELSARVDREEKVDFKSILKILLNNKNINKEQSDILRKIRNAFDANNYPDKGVVEIKALPEIAMSIKKAFGEYAIMKSRGGGGSGGGGSTRGGRDHMVLHEYVNAAGITGGSGGRDHMVLHEYVNAAGITGGSGGRDHMVLHEYVNAAGITGGSGGRDHMVLHEYVNAAGITGGSGGRDHMVLHEYVNAAGITGGSGGRDHMVLHEYVNAAGITGGSGGRDHMVLHEYVNAAGIT

SEQ ID NO: 136 - protein, 1291 aa, Artificial Sequence
  chemically synthesized
MDYKDHDGDYKDHDIDYKDDDDKGGMLLPVPLLLGLLGAAADGGNIPALVENQKKYFGTYSVMAMLNAQTVLDHIQKVADIEGEQNENNENLWFHPVMSHLYNAKNGYDKQPEKTMFIIERLQSYFPFLKIMAENQREYSNGKYKQNRVEVNSNDIFEVLKRAFGVLKMYRDLTNAYKTYEEKLNDGCEFLTSTEQPLSGMINNYYTVALRNMNERYGYKTEDLAFIQDKRFKFVKDAYGKKKSQVNTGFFLSLQDYNGDTQKKLHLSGVGIALLICLFLDKQYINIFLSRLPIFSSYNAQSEERRIIIRSFGINSIKLPKDRIHSEKSNKSVAMDMLNEVKRCPDELFTTLSAEKQSRFRIISDDHNEVLMKRSSDRFVPLLLQYIDYGKLFDHIRFHVNMGKLRYLLKADKTCIDGQTRVRVIEQPLNGFGRLEEAETMRKQENGTFGNSGIRIRDFENMKRDDANPANYPYIVDTYTHYILENNKVEMFINDKEDSAPLLPVIEDDRYVVKTIPSCRMSTLEIPAMAFHMFLFGSKKTEKLIVDVHNRYKRLFQAMQKEEVTAENIASFGIAESDLPQKILDLISGNAHGKDVDAFIRLTVDDMLTDTERRIKRFKDDRKSIRSADNKMGKRGFKQISTGKLADFLAKDIVLFQPSVNDGENKITGLNYRIMQSAIAVYDSGDDYEAKQQFKLMFEKARLIGKGTTEPHPFLYKVFARSIPANAVEFYERYLIERKFYLTGLSNEIKKGNRVDVPFIRRDQNKWKTPAMKTLGRIYSEDLPVELPRQMFDNEIKSHLKSLPQMEGIDFNNANVTYLIAEYMKRVLDDDFQTFYQWNRNYRYMDMLKGEYDRKGSLQHCFTSVEEREGLWKERASRTERYRKQASNKIRSNRQMRNASSEEIETILDKRLSNSRNEYQKSEKVIRRYRVQDALLFLLAKKTLTELADFDGERFKLKEIMPDAEKGILSEIMPMSFTFEKGGKKYTITSEGMKLKNYGDFFVLASDKRIGNLLELVGSDIVSKEDIMEEFNKYDQCRPEISSIVFNLEKWAFDTYPELSARVDREEKVDFKSILKILLNNKNINKEQSDILRKIRNAFDANNYPDKGVVEIKALPEIAMSIKKAFGEYAIMKSRGGGGSGGGGSTRGGRDHMVLHEYVNAAGITGGSGGRDHMVLHEYVNAAGITGGSGGRDHMVLHEYVNAAGITGGSGGRDHMVLHEYVNAAGITGGSGGRDHMVLHEYVNAAGITGGSGGRDHMVLHEYVNAAGITGGSGGRDHMVLHEYVNAAGIT

SEQ ID NO: 137 - protein, 1283 aa, Artificial Sequence
  chemically synthesized
MDYKDHDGDYKDHDIDYKDDDDKGGGITLGKDELGGNIPALVENQKKYFGTYSVMAMLNAQTVLDHIQKVADIEGEQNENNENLWFHPVMSHLYNAKNGYDKQPEKTMFIIERLQSYFPFLKIMAENQREYSNGKYKQNRVEVNSNDIFEVLKRAFGVLKMYRDLTNAYKTYEEKLNDGCEFLTSTEQPLSGMINNYYTVALRNMNERYGYKTEDLAFIQDKRFKFVKDAYGKKKSQVNTGFFLSLQDYNGDTQKKLHLSGVGIALLICLFLDKQYINIFLSRLPIFSSYNAQSEERRIIIRSFGINSIKLPKDRIHSEKSNKSVAMDMLNEVKRCPDELFTTLSAEKQSRFRIISDDHNEVLMKRSSDRFVPLLLQYIDYGKLFDHIRFHVNMGKLRYLLKADKTCIDGQTRVRVIEQPLNGFGRLEEAETMRKQENGTFGNSGIRIRDFENMKRDDANPANYPYIVDTYTHYILENNKVEMFINDKEDSAPLLPVIEDDRYVVKTIPSCRMSTLEIPAMAFHMFLFGSKKTEKLIVDVHNRYKRLFQAMQKEEVTAENIASFGIAESDLPQKILDLISGNAHGKDVDAFIRLTVDDMLTDTERRIKRFKDDRKSIRSADNKMGKRGFKQISTGKLADFLAKDIVLFQPSVNDGENKITGLNYRIMQSAIAVYDSGDDYEAKQQFKLMFEKARLIGKGTTEPHPFLYKVFARSIPANAVEFYERYLIERKFYLTGLSNEIKKGNRVDVPFIRRDQNKWKTPAMKTLGRIYSEDLPVELPRQMFDNEIKSHLKSLPQMEGIDFNNANVTYLIAEYMKRVLDDDFQTFYQWNRNYRYMDMLKGEYDRKGSLQHCFTSVEEREGLWKERASRTERYRKQASNKIRSNRQMRNASSEEIETILDKRLSNSRNEYQKSEKVIRRYRVQDALLFLLAKKTLTELADFDGERFKLKEIMPDAEKGILSEIMPMSFTFEKGGKKYTITSEGMKLKNYGDFFVLASDKRIGNLLELVGSDIVSKEDIMEEFNKYDQCRPEISSIVFNLEKWAFDTYPELSARVDREEKVDFKSILKILLNNKNINKEQSDILRKIRNAFDANNYPDKGVVEIKALPEIAMSIKKAFGEYAIMKSRGGGGSGGGGSTRGGRDHMVLHEYVNAAGITGGSGGRDHMVLHEYVNAAGITGGSGGRDHMVLHEYVNAAGITGGSGGRDHMVLHEYVNAAGITGGSGGRDHMVLHEYVNAAGITGGSGGRDHMVLHEYVNAAGITGGSGGRDHMVLHEYVNAAGIT

SEQ ID NO: 138 - protein, 1277 aa, Artificial Sequence
  chemically synthesized
MDYKDHDGDYKDHDIDYKDDDDKGGSKLGGNIPALVENQKKYFGTYSVMAMLNAQTVLDHIQKVADIEGEQNENNENLWFHPVMSHLYNAKNGYDKQPEKTMFIIERLQSYFPFLKIMAENQREYSNGKYKQNRVEVNSNDIFEVLKRAFGVLKMYRDLTNAYKTYEEKLNDGCEFLTSTEQPLSGMINNYYTVALRNMNERYGYKTEDLAFIQDKRFKFVKDAYGKKKSQVNTGFFLSLQDYNGDTQKKLHLSGVGIALLICLFLDKQYINIFLSRLPIFSSYNAQSEERRIIIRSFGINSIKLPKDRIHSEKSNKSVAMDMLNEVKRCPDELFTTLSAEKQSRFRIISDDHNEVLMKRSSDRFVPLLLQYIDYGKLFDHIRFHVNMGKLRYLLKADKTCIDGQTRVRVIEQPLNGFGRLEEAETMRKQENGTFGNSGIRIRDFENMKRDDANPANYPYIVDTYTHYILENNKVEMFINDKEDSAPLLPVIEDDRYVVKTIPSCRMSTLEIPAMAFHMFLFGSKKTEKLIVDVHNRYKRLFQAMQKEEVTAENIASFGIAESDLPQKILDLISGNAHGKDVDAFIRLTVDDMLTDTERRIKRFKDDRKSIRSADNKMGKRGFKQISTGKLADFLAKDIVLFQPSVNDGENKITGLNYRIMQSAIAVYDSGDDYEAKQQFKLMFEKARLIGKGTTEPHPFLYKVFARSIPANAVEFYERYLIERKFYLTGLSNEIKKGNRVDVPFIRRDQNKWKTPAMKTLGRIYSEDLPVELPRQMFDNEIKSHLKSLPQMEGIDFNNANVTYLIAEYMKRVLDDDFQTFYQWNRNYRYMDMLKGEYDRKGSLQHCFTSVEEREGLWKERASRTERYRKQASNKIRSNRQMRNASSEEIETILDKRLSNSRNEYQKSEKVIRRYRVQDALLFLLAKKTLTELADFDGERFKLKEIMPDAEKGILSEIMPMSFTFEKGGKKYTITSEGMKLKNYGDFFVLASDKRIGNLLELVGSDIVSKEDIMEEFNKYDQCRPEISSIVFNLEKWAFDTYPELSARVDREEKVDFKSILKILLNNKNINKEQSDILRKIRNAFDANNYPDKGVVEIKALPEIAMSIKKAFGEYAIMKSRGGGGSGGGGSTRGGRDHMVLHEYVNAAGITGGSGGRDHMVLHEYVNAAGITGGSGGRDHMVLHEYVNAAGITGGSGGRDHMVLHEYVNAAGITGGSGGRDHMVLHEYVNAAGITGGSGGRDHMVLHEYVNAAGITGGSGGRDHMVLHEYVNAAGIT

SEQ ID NO: 139 - protein, 1206 aa, Artificial Sequence
  chemically synthesized
MDYKDHDGDYKDHDIDYKDDDDKGGNSKKRSLEDNETEIKVSRDTWNTKNMRSLEPPRSKKRIHGGNIPALVENQKKYFGTYSVMAMLNAQTVLDHIQKVADIEGEQNENNENLWFHPVMSHLYNAKNGYDKQPEKTMFIIERLQSYFPFLKIMAENQREYSNGKYKQNRVEVNSNDIFEVLKRAFGVLKMYRDLTNAYKTYEEKLNDGCEFLTSTEQPLSGMINNYYTVALRNMNERYGYKTEDLAFIQDKRFKFVKDAYGKKKSQVNTGFFLSLQDYNGDTQKKLHLSGVGIALLICLFLDKQYINIFLSRLPIFSSYNAQSEERRIIIRSFGINSIKLPKDRIHSEKSNKSVAMDMLNEVKRCPDELFTTLSAEKQSRFRIISDDHNEVLMKRSSDRFVPLLLQYIDYGKLFDHIRFHVNMGKLRYLLKADKTCIDGQTRVRVIEQPLNGFGRLEEAETMRKQENGTFGNSGIRIRDFENMKRDDANPANYPYIVDTYTHYILENNKVEMFINDKEDSAPLLPVIEDDRYVVKTIPSCRMSTLEIPAMAFHMFLFGSKKTEKLIVDVHNRYKRLFQAMQKEEVTAENIASFGIAESDLPQKILDLISGNAHGKDVDAFIRLTVDDMLTDTERRIKRFKDDRKSIRSADNKMGKRGFKQISTGKLADFLAKDIVLFQPSVNDGENKITGLNYRIMQSAIAVYDSGDDYEAKQQFKLMFEKARLIGKGTTEPHPFLYKVFARSIPANAVEFYERYLIERKFYLTGLSNEIKKGNRVDVPFIRRDQNKWKTPAMKTLGRIYSEDLPVELPRQMFDNEIKSHLKSLPQMEGIDFNNANVTYLIAEYMKRVLDDDFQTFYQWNRNYRYMDMLKGEYDRKGSLQHCFTSVEEREGLWKERASRTERYRKQASNKIRSNRQMRNASSEEIETILDKRLSNSRNEYQKSEKVIRRYRVQDALLFLLAKKTLTELADFDGERFKLKEIMPDAEKGILSEIMPMSFTFEKGGKKYTITSEGMKLKNYGDFFVLASDKRIGNLLELVGSDIVSKEDSRGGGGSGGGGSTRGGRDHMVLHEYVNAAGITGGSGGRDHMVLHEYVNAAGITGGSGGRDHMVLHEYVNAAGITGGSGGRDHMVLHEYVNAAGITGGSGGRDHMVLHEYVNAAGITGGSGGRDHMVLHEYVNAAGITGGSGGRDHMVLHEYVNAAGIT

SEQ ID NO: 140 - protein, 1206 aa, Artificial Sequence
  chemically synthesized
MDYKDHDGDYKDHDIDYKDDDDKGGKSKKRSLEDNETEIEVSRDTWNNKNMRSLEPPRSKKRINGGNIPALVENQKKYFGTYSVMAMLNAQTVLDHIQKVADIEGEQNENNENLWFHPVMSHLYNAKNGYDKQPEKTMFIIERLQSYFPFLKIMAENQREYSNGKYKQNRVEVNSNDIFEVLKRAFGVLKMYRDLTNAYKTYEEKLNDGCEFLTSTEQPLSGMINNYYTVALRNMNERYGYKTEDLAFIQDKRFKFVKDAYGKKKSQVNTGFFLSLQDYNGDTQKKLHLSGVGIALLICLFLDKQYINIFLSRLPIFSSYNAQSEERRIIIRSFGINSIKLPKDRIHSEKSNKSVAMDMLNEVKRCPDELFTTLSAEKQSRFRIISDDHNEVLMKRSSDRFVPLLLQYIDYGKLFDHIRFHVNMGKLRYLLKADKTCIDGQTRVRVIEQPLNGFGRLEEAETMRKQENGTFGNSGIRIRDFENMKRDDANPANYPYIVDTYTHYILENNKVEMFINDKEDSAPLLPVIEDDRYVVKTIPSCRMSTLEIPAMAFHMFLFGSKKTEKLIVDVHNRYKRLFQAMQKEEVTAENIASFGIAESDLPQKILDLISGNAHGKDVDAFIRLTVDDMLTDTERRIKRFKDDRKSIRSADNKMGKRGFKQISTGKLADFLAKDIVLFQPSVNDGENKITGLNYRIMQSAIAVYDSGDDYEAKQQFKLMFEKARLIGKGTTEPHPFLYKVFARSIPANAVEFYERYLIERKFYLTGLSNEIKKGNRVDVPFIRRDQNKWKTPAMKTLGRIYSEDLPVELPRQMFDNEIKSHLKSLPQMEGIDFNNANVTYLIAEYMKRVLDDDFQTFYQWNRNYRYMDMLKGEYDRKGSLQHCFTSVEEREGLWKERASRTERYRKQASNKIRSNRQMRNASSEEIETILDKRLSNSRNEYQKSEKVIRRYRVQDALLFLLAKKTLTELADFDGERFKLKEIMPDAEKGILSEIMPMSFTFEKGGKKYTITSEGMKLKNYGDFFVLASDKRIGNLLELVGSDIVSKEDSRGGGGSGGGGSTRGGRDHMVLHEYVNAAGITGGSGGRDHMVLHEYVNAAGITGGSGGRDHMVLHEYVNAAGITGGSGGRDHMVLHEYVNAAGITGGSGGRDHMVLHEYVNAAGITGGSGGRDHMVLHEYVNAAGITGGSGGRDHMVLHEYVNAAGIT

SEQ ID NO: 141 - protein, 1178 aa, Artificial Sequence
  chemically synthesized
MDYKDHDGDYKDHDIDYKDDDDKGGLQLPPLERLTLGGNIPALVENQKKYFGTYSVMAMLNAQTVLDHIQKVADIEGEQNENNENLWFHPVMSHLYNAKNGYDKQPEKTMFIIERLQSYFPFLKIMAENQREYSNGKYKQNRVEVNSNDIFEVLKRAFGVLKMYRDLTNAYKTYEEKLNDGCEFLTSTEQPLSGMINNYYTVALRNMNERYGYKTEDLAFIQDKRFKFVKDAYGKKKSQVNTGFFLSLQDYNGDTQKKLHLSGVGIALLICLFLDKQYINIFLSRLPIFSSYNAQSEERRIIIRSFGINSIKLPKDRIHSEKSNKSVAMDMLNEVKRCPDELFTTLSAEKQSRFRIISDDHNEVLMKRSSDRFVPLLLQYIDYGKLFDHIRFHVNMGKLRYLLKADKTCIDGQTRVRVIEQPLNGFGRLEEAETMRKQENGTFGNSGIRIRDFENMKRDDANPANYPYIVDTYTHYILENNKVEMFINDKEDSAPLLPVIEDDRYVVKTIPSCRMSTLEIPAMAFHMFLFGSKKTEKLIVDVHNRYKRLFQAMQKEEVTAENIASFGIAESDLPQKILDLISGNAHGKDVDAFIRLTVDDMLTDTERRIKRFKDDRKSIRSADNKMGKRGFKQISTGKLADFLAKDIVLFQPSVNDGENKITGLNYRIMQSAIAVYDSGDDYEAKQQFKLMFEKARLIGKGTTEPHPFLYKVFARSIPANAVEFYERYLIERKFYLTGLSNEIKKGNRVDVPFIRRDQNKWKTPAMKTLGRIYSEDLPVELPRQMFDNEIKSHLKSLPQMEGIDFNNANVTYLIAEYMKRVLDDDFQTFYQWNRNYRYMDMLKGEYDRKGSLQHCFTSVEEREGLWKERASRTERYRKQASNKIRSNRQMRNASSEEIETILDKRLSNSRNEYQKSEKVIRRYRVQDALLFLLAKKTLTELADFDGERFKLKEIMPDAEKGILSEIMPMSFTFEKGGKKYTITSEGMKLKNYGDFFVLASDKRIGNLLELVGSDIVSKEDSRGGGGSGGGGSTRGGRDHMVLHEYVNAAGITGGSGGRDHMVLHEYVNAAGITGGSGGRDHMVLHEYVNAAGITGGSGGRDHMVLHEYVNAAGITGGSGGRDHMVLHEYVNAAGITGGSGGRDHMVLHEYVNAAGITGGSGGRDHMVLHEYVNAAGIT

SEQ ID NO: 142 - protein, 1183 aa, Artificial Sequence
  chemically synthesized
MDYKDHDGDYKDHDIDYKDDDDKGGGSLQLPPLERLTLGSSGGNIPALVENQKKYFGTYSVMAMLNAQTVLDHIQKVADIEGEQNENNENLWFHPVMSHLYNAKNGYDKQPEKTMFIIERLQSYFPFLKIMAENQREYSNGKYKQNRVEVNSNDIFEVLKRAFGVLKMYRDLTNAYKTYEEKLNDGCEFLTSTEQPLSGMINNYYTVALRNMNERYGYKTEDLAFIQDKRFKFVKDAYGKKKSQVNTGFFLSLQDYNGDTQKKLHLSGVGIALLICLFLDKQYINIFLSRLPIFSSYNAQSEERRIIIRSFGINSIKLPKDRIHSEKSNKSVAMDMLNEVKRCPDELFTTLSAEKQSRFRIISDDHNEVLMKRSSDRFVPLLLQYIDYGKLFDHIRFHVNMGKLRYLLKADKTCIDGQTRVRVIEQPLNGFGRLEEAETMRKQENGTFGNSGIRIRDFENMKRDDANPANYPYIVDTYTHYILENNKVEMFINDKEDSAPLLPVIEDDRYVVKTIPSCRMSTLEIPAMAFHMFLFGSKKTEKLIVDVHNRYKRLFQAMQKEEVTAENIASFGIAESDLPQKILDLISGNAHGKDVDAFIRLTVDDMLTDTERRIKRFKDDRKSIRSADNKMGKRGFKQISTGKLADFLAKDIVLFQPSVNDGENKITGLNYRIMQSAIAVYDSGDDYEAKQQFKLMFEKARLIGKGTTEPHPFLYKVFARSIPANAVEFYERYLIERKFYLTGLSNEIKKGNRVDVPFIRRDQNKWKTPAMKTLGRIYSEDLPVELPRQMFDNEIKSHLKSLPQMEGIDFNNANVTYLIAEYMKRVLDDDFQTFYQWNRNYRYMDMLKGEYDRKGSLQHCFTSVEEREGLWKERASRTERYRKQASNKIRSNRQMRNASSEEIETILDKRLSNSRNEYQKSEKVIRRYRVQDALLFLLAKKTLTELADFDGERFKLKEIMPDAEKGILSEIMPMSFTFEKGGKKYTITSEGMKLKNYGDFFVLASDKRIGNLLELVGSDIVSKEDSRGGGGSGGGGSTRGGRDHMVLHEYVNAAGITGGSGGRDHMVLHEYVNAAGITGGSGGRDHMVLHEYVNAAGITGGSGGRDHMVLHEYVNAAGITGGSGGRDHMVLHEYVNAAGITGGSGGRDHMVLHEYVNAAGITGGSGGRDHMVLHEYVNAAGIT

SEQ ID NO: 143 - protein, 1199 aa, Artificial Sequence
  chemically synthesized
MDYKDHDGDYKDHDIDYKDDDDKGGMSVLTPLLLRGLTGSARRLPVPRAKIHSLGDPGGNIPALVENQKKYFGTYSVMAMLNAQTVLDHIQKVADIEGEQNENNENLWFHPVMSHLYNAKNGYDKQPEKTMFIIERLQSYFPFLKIMAENQREYSNGKYKQNRVEVNSNDIFEVLKRAFGVLKMYRDLTNAYKTYEEKLNDGCEFLTSTEQPLSGMINNYYTVALRNMNERYGYKTEDLAFIQDKRFKFVKDAYGKKKSQVNTGFFLSLQDYNGDTQKKLHLSGVGIALLICLFLDKQYINIFLSRLPIFSSYNAQSEERRIIIRSFGINSIKLPKDRIHSEKSNKSVAMDMLNEVKRCPDELFTTLSAEKQSRFRIISDDHNEVLMKRSSDRFVPLLLQYIDYGKLFDHIRFHVNMGKLRYLLKADKTCIDGQTRVRVIEQPLNGFGRLEEAETMRKQENGTFGNSGIRIRDFENMKRDDANPANYPYIVDTYTHYILENNKVEMFINDKEDSAPLLPVIEDDRYVVKTIPSCRMSTLEIPAMAFHMFLFGSKKTEKLIVDVHNRYKRLFQAMQKEEVTAENIASFGIAESDLPQKILDLISGNAHGKDVDAFIRLTVDDMLTDTERRIKRFKDDRKSIRSADNKMGKRGFKQISTGKLADFLAKDIVLFQPSVNDGENKITGLNYRIMQSAIAVYDSGDDYEAKQQFKLMFEKARLIGKGTTEPHPFLYKVFARSIPANAVEFYERYLIERKFYLTGLSNEIKKGNRVDVPFIRRDQNKWKTPAMKTLGRIYSEDLPVELPRQMFDNEIKSHLKSLPQMEGIDFNNANVTYLIAEYMKRVLDDDFQTFYQWNRNYRYMDMLKGEYDRKGSLQHCFTSVEEREGLWKERASRTERYRKQASNKIRSNRQMRNASSEEIETILDKRLSNSRNEYQKSEKVIRRYRVQDALLFLLAKKTLTELADFDGERFKLKEIMPDAEKGILSEIMPMSFTFEKGGKKYTITSEGMKLKNYGDFFVLASDKRIGNLLELVGSDIVSKEDSRGGGGSGGGGSTRGGRDHMVLHEYVNAAGITGGSGGRDHMVLHEYVNAAGITGGSGGRDHMVLHEYVNAAGITGGSGGRDHMVLHEYVNAAGITGGSGGRDHMVLHEYVNAAGITGGSGGRDHMVLHEYVNAAGITGGSGGRDHMVLHEYVNAAGIT

SEQ ID NO: 144 - protein, 1297 aa, Artificial Sequence
  chemically synthesized
MDYKDHDGDYKDHDIDYKDDDDKGGMSVLTPLLLRGLTGSARRLPVPRAKIHSLGDPMSVLTPLLLRGLTGSARRLPVPRAKIHSLGKLATMSVLTPLLLRGLTGSARRLPVPRAKIHSLGDPMSVLTPLLLRGLTGSARRLPVPRAKIHSLGKLGGNIPALVENQKKYFGTYSVMAMLNAQTVLDHIQKVADIEGEQNENNENLWFHPVMSHLYNAKNGYDKQPEKTMFIIERLQSYFPFLKIMAENQREYSNGKYKQNRVEVNSNDIFEVLKRAFGVLKMYRDLTNAYKTYEEKLNDGCEFLTSTEQPLSGMINNYYTVALRNMNERYGYKTEDLAFIQDKRFKFVKDAYGKKKSQVNTGFFLSLQDYNGDTQKKLHLSGVGIALLICLFLDKQYINIFLSRLPIFSSYNAQSEERRIIIRSFGINSIKLPKDRIHSEKSNKSVAMDMLNEVKRCPDELFTTLSAEKQSRFRIISDDHNEVLMKRSSDRFVPLLLQYIDYGKLFDHIRFHVNMGKLRYLLKADKTCIDGQTRVRVIEQPLNGFGRLEEAETMRKQENGTFGNSGIRIRDFENMKRDDANPANYPYIVDTYTHYILENNKVEMFINDKEDSAPLLPVIEDDRYVVKTIPSCRMSTLEIPAMAFHMFLFGSKKTEKLIVDVHNRYKRLFQAMQKEEVTAENIASFGIAESDLPQKILDLISGNAHGKDVDAFIRLTVDDMLTDTERRIKRFKDDRKSIRSADNKMGKRGFKQISTGKLADFLAKDIVLFQPSVNDGENKITGLNYRIMQSAIAVYDSGDDYEAKQQFKLMFEKARLIGKGTTEPHPFLYKVFARSIPANAVEFYERYLIERKFYLTGLSNEIKKGNRVDVPFIRRDQNKWKTPAMKTLGRIYSEDLPVELPRQMFDNEIKSHLKSLPQMEGIDFNNANVTYLIAEYMKRVLDDDFQTFYQWNRNYRYMDMLKGEYDRKGSLQHCFTSVEEREGLWKERASRTERYRKQASNKIRSNRQMRNASSEEIETILDKRLSNSRNEYQKSEKVIRRYRVQDALLFLLAKKTLTELADFDGERFKLKEIMPDAEKGILSEIMPMSFTFEKGGKKYTITSEGMKLKNYGDFFVLASDKRIGNLLELVGSDIVSKEDSRGGGGSGGGGSTRGGRDHMVLHEYVNAAGITGGSGGRDHMVLHEYVNAAGITGGSGGRDHMVLHEYVNAAGITGGSGGRDHMVLHEYVNAAGITGGSGGRDHMVLHEYVNAAGITGGSGGRDHMVLHEYVNAAGITGGSGGRDHMVLHEYVNAAGIT

SEQ ID NO: 145 - protein, 1188 aa, Artificial Sequence
  chemically synthesized
MDYKDHDGDYKDHDIDYKDDDDKGGMYRMQLLSCIALSLALVTNSLGGNIPALVENQKKYFGTYSVMAMLNAQTVLDHIQKVADIEGEQNENNENLWFHPVMSHLYNAKNGYDKQPEKTMFIIERLQSYFPFLKIMAENQREYSNGKYKQNRVEVNSNDIFEVLKRAFGVLKMYRDLTNAYKTYEEKLNDGCEFLTSTEQPLSGMINNYYTVALRNMNERYGYKTEDLAFIQDKRFKFVKDAYGKKKSQVNTGFFLSLQDYNGDTQKKLHLSGVGIALLICLFLDKQYINIFLSRLPIFSSYNAQSEERRIIIRSFGINSIKLPKDRIHSEKSNKSVAMDMLNEVKRCPDELFTTLSAEKQSRFRIISDDHNEVLMKRSSDRFVPLLLQYIDYGKLFDHIRFHVNMGKLRYLLKADKTCIDGQTRVRVIEQPLNGFGRLEEAETMRKQENGTFGNSGIRIRDFENMKRDDANPANYPYIVDTYTHYILENNKVEMFINDKEDSAPLLPVIEDDRYVVKTIPSCRMSTLEIPAMAFHMFLFGSKKTEKLIVDVHNRYKRLFQAMQKEEVTAENIASFGIAESDLPQKILDLISGNAHGKDVDAFIRLTVDDMLTDTERRIKRFKDDRKSIRSADNKMGKRGFKQISTGKLADFLAKDIVLFQPSVNDGENKITGLNYRIMQSAIAVYDSGDDYEAKQQFKLMFEKARLIGKGTTEPHPFLYKVFARSIPANAVEFYERYLIERKFYLTGLSNEIKKGNRVDVPFIRRDQNKWKTPAMKTLGRIYSEDLPVELPRQMFDNEIKSHLKSLPQMEGIDFNNANVTYLIAEYMKRVLDDDFQTFYQWNRNYRYMDMLKGEYDRKGSLQHCFTSVEEREGLWKERASRTERYRKQASNKIRSNRQMRNASSEEIETILDKRLSNSRNEYQKSEKVIRRYRVQDALLFLLAKKTLTELADFDGERFKLKEIMPDAEKGILSEIMPMSFTFEKGGKKYTITSEGMKLKNYGDFFVLASDKRIGNLLELVGSDIVSKEDSRGGGGSGGGGSTRGGRDHMVLHEYVNAAGITGGSGGRDHMVLHEYVNAAGITGGSGGRDHMVLHEYVNAAGITGGSGGRDHMVLHEYVNAAGITGGSGGRDHMVLHEYVNAAGITGGSGGRDHMVLHEYVNAAGITGGSGGRDHMVLHEYVNAAGIT

SEQ ID NO: 146 - protein, 1210 aa, Artificial Sequence
  chemically synthesized
MDYKDHDGDYKDHDIDYKDDDDKGGMGCCFSKTAAKGEAAAERPGEAAVASSPSKANGQENGHVKVGSGGNIPALVENQKKYFGTYSVMAMLNAQTVLDHIQKVADIEGEQNENNENLWFHPVMSHLYNAKNGYDKQPEKTMFIIERLQSYFPFLKIMAENQREYSNGKYKQNRVEVNSNDIFEVLKRAFGVLKMYRDLTNAYKTYEEKLNDGCEFLTSTEQPLSGMINNYYTVALRNMNERYGYKTEDLAFIQDKRFKFVKDAYGKKKSQVNTGFFLSLQDYNGDTQKKLHLSGVGIALLICLFLDKQYINIFLSRLPIFSSYNAQSEERRIIIRSFGINSIKLPKDRIHSEKSNKSVAMDMLNEVKRCPDELFTTLSAEKQSRFRIISDDHNEVLMKRSSDRFVPLLLQYIDYGKLFDHIRFHVNMGKLRYLLKADKTCIDGQTRVRVIEQPLNGFGRLEEAETMRKQENGTFGNSGIRIRDFENMKRDDANPANYPYIVDTYTHYILENNKVEMFINDKEDSAPLLPVIEDDRYVVKTIPSCRMSTLEIPAMAFHMFLFGSKKTEKLIVDVHNRYKRLFQAMQKEEVTAENIASFGIAESDLPQKILDLISGNAHGKDVDAFIRLTVDDMLTDTERRIKRFKDDRKSIRSADNKMGKRGFKQISTGKLADFLAKDIVLFQPSVNDGENKITGLNYRIMQSAIAVYDSGDDYEAKQQFKLMFEKARLIGKGTTEPHPFLYKVFARSIPANAVEFYERYLIERKFYLTGLSNEIKKGNRVDVPFIRRDQNKWKTPAMKTLGRIYSEDLPVELPRQMFDNEIKSHLKSLPQMEGIDFNNANVTYLIAEYMKRVLDDDFQTFYQWNRNYRYMDMLKGEYDRKGSLQHCFTSVEEREGLWKERASRTERYRKQASNKIRSNRQMRNASSEEIETILDKRLSNSRNEYQKSEKVIRRYRVQDALLFLLAKKTLTELADFDGERFKLKEIMPDAEKGILSEIMPMSFTFEKGGKKYTITSEGMKLKNYGDFFVLASDKRIGNLLELVGSDIVSKEDSRGGGGSGGGGSTRGGRDHMVLHEYVNAAGITGGSGGRDHMVLHEYVNAAGITGGSGGRDHMVLHEYVNAAGITGGSGGRDHMVLHEYVNAAGITGGSGGRDHMVLHEYVNAAGITGGSGGRDHMVLHEYVNAAGITGGSGGRDHMVLHEYVNAAGIT

SEQ ID NO: 147 - protein, 1184 aa, Artificial Sequence
  chemically synthesized
MDYKDHDGDYKDHDIDYKDDDDKGGMLLPVPLLLGLLGAAADGGNIPALVENQKKYFGTYSVMAMLNAQTVLDHIQKVADIEGEQNENNENLWFHPVMSHLYNAKNGYDKQPEKTMFIIERLQSYFPFLKIMAENQREYSNGKYKQNRVEVNSNDIFEVLKRAFGVLKMYRDLTNAYKTYEEKLNDGCEFLTSTEQPLSGMINNYYTVALRNMNERYGYKTEDLAFIQDKRFKFVKDAYGKKKSQVNTGFFLSLQDYNGDTQKKLHLSGVGIALLICLFLDKQYINIFLSRLPIFSSYNAQSEERRIIIRSFGINSIKLPKDRIHSEKSNKSVAMDMLNEVKRCPDELFTTLSAEKQSRFRIISDDHNEVLMKRSSDRFVPLLLQYIDYGKLFDHIRFHVNMGKLRYLLKADKTCIDGQTRVRVIEQPLNGFGRLEEAETMRKQENGTFGNSGIRIRDFENMKRDDANPANYPYIVDTYTHYILENNKVEMFINDKEDSAPLLPVIEDDRYVVKTIPSCRMSTLEIPAMAFHMFLFGSKKTEKLIVDVHNRYKRLFQAMQKEEVTAENIASFGIAESDLPQKILDLISGNAHGKDVDAFIRLTVDDMLTDTERRIKRFKDDRKSIRSADNKMGKRGFKQISTGKLADFLAKDIVLFQPSVNDGENKITGLNYRIMQSAIAVYDSGDDYEAKQQFKLMFEKARLIGKGTTEPHPFLYKVFARSIPANAVEFYERYLIERKFYLTGLSNEIKKGNRVDVPFIRRDQNKWKTPAMKTLGRIYSEDLPVELPRQMFDNEIKSHLKSLPQMEGIDFNNANVTYLIAEYMKRVLDDDFQTFYQWNRNYRYMDMLKGEYDRKGSLQHCFTSVEEREGLWKERASRTERYRKQASNKIRSNRQMRNASSEEIETILDKRLSNSRNEYQKSEKVIRRYRVQDALLFLLAKKTLTELADFDGERFKLKEIMPDAEKGILSEIMPMSFTFEKGGKKYTITSEGMKLKNYGDFFVLASDKRIGNLLELVGSDIVSKEDSRGGGGSGGGGSTRGGRDHMVLHEYVNAAGITGGSGGRDHMVLHEYVNAAGITGGSGGRDHMVLHEYVNAAGITGGSGGRDHMVLHEYVNAAGITGGSGGRDHMVLHEYVNAAGITGGSGGRDHMVLHEYVNAAGITGGSGGRDHMVLHEYVNAAGIT

SEQ ID NO: 148 - protein, 1176 aa, Artificial Sequence
  chemically synthesized
MDYKDHDGDYKDHDIDYKDDDDKGGGITLGKDELGGNIPALVENQKKYFGTYSVMAMLNAQTVLDHIQKVADIEGEQNENNENLWFHPVMSHLYNAKNGYDKQPEKTMFIIERLQSYFPFLKIMAENQREYSNGKYKQNRVEVNSNDIFEVLKRAFGVLKMYRDLTNAYKTYEEKLNDGCEFLTSTEQPLSGMINNYYTVALRNMNERYGYKTEDLAFIQDKRFKFVKDAYGKKKSQVNTGFFLSLQDYNGDTQKKLHLSGVGIALLICLFLDKQYINIFLSRLPIFSSYNAQSEERRIIIRSFGINSIKLPKDRIHSEKSNKSVAMDMLNEVKRCPDELFTTLSAEKQSRFRIISDDHNEVLMKRSSDRFVPLLLQYIDYGKLFDHIRFHVNMGKLRYLLKADKTCIDGQTRVRVIEQPLNGFGRLEEAETMRKQENGTFGNSGIRIRDFENMKRDDANPANYPYIVDTYTHYILENNKVEMFINDKEDSAPLLPVIEDDRYVVKTIPSCRMSTLEIPAMAFHMFLFGSKKTEKLIVDVHNRYKRLFQAMQKEEVTAENIASFGIAESDLPQKILDLISGNAHGKDVDAFIRLTVDDMLTDTERRIKRFKDDRKSIRSADNKMGKRGFKQISTGKLADFLAKDIVLFQPSVNDGENKITGLNYRIMQSAIAVYDSGDDYEAKQQFKLMFEKARLIGKGTTEPHPFLYKVFARSIPANAVEFYERYLIERKFYLTGLSNEIKKGNRVDVPFIRRDQNKWKTPAMKTLGRIYSEDLPVELPRQMFDNEIKSHLKSLPQMEGIDFNNANVTYLIAEYMKRVLDDDFQTFYQWNRNYRYMDMLKGEYDRKGSLQHCFTSVEEREGLWKERASRTERYRKQASNKIRSNRQMRNASSEEIETILDKRLSNSRNEYQKSEKVIRRYRVQDALLFLLAKKTLTELADFDGERFKLKEIMPDAEKGILSEIMPMSFTFEKGGKKYTITSEGMKLKNYGDFFVLASDKRIGNLLELVGSDIVSKEDSRGGGGSGGGGSTRGGRDHMVLHEYVNAAGITGGSGGRDHMVLHEYVNAAGITGGSGGRDHMVLHEYVNAAGITGGSGGRDHMVLHEYVNAAGITGGSGGRDHMVLHEYVNAAGITGGSGGRDHMVLHEYVNAAGITGGSGGRDHMVLHEYVNAAGIT

SEQ ID NO: 149 - protein, 1170 aa, Artificial Sequence
  chemically synthesized
MDYKDHDGDYKDHDIDYKDDDDKGGSKLGGNIPALVENQKKYFGTYSVMAMLNAQTVLDHIQKVADIEGEQNENNENLWFHPVMSHLYNAKNGYDKQPEKTMFIIERLQSYFPFLKIMAENQREYSNGKYKQNRVEVNSNDIFEVLKRAFGVLKMYRDLTNAYKTYEEKLNDGCEFLTSTEQPLSGMINNYYTVALRNMNERYGYKTEDLAFIQDKRFKFVKDAYGKKKSQVNTGFFLSLQDYNGDTQKKLHLSGVGIALLICLFLDKQYINIFLSRLPIFSSYNAQSEERRIIIRSFGINSIKLPKDRIHSEKSNKSVAMDMLNEVKRCPDELFTTLSAEKQSRFRIISDDHNEVLMKRSSDRFVPLLLQYIDYGKLFDHIRFHVNMGKLRYLLKADKTCIDGQTRVRVIEQPLNGFGRLEEAETMRKQENGTFGNSGIRIRDFENMKRDDANPANYPYIVDTYTHYILENNKVEMFINDKEDSAPLLPVIEDDRYVVKTIPSCRMSTLEIPAMAFHMFLFGSKKTEKLIVDVHNRYKRLFQAMQKEEVTAENIASFGIAESDLPQKILDLISGNAHGKDVDAFIRLTVDDMLTDTERRIKRFKDDRKSIRSADNKMGKRGFKQISTGKLADFLAKDIVLFQPSVNDGENKITGLNYRIMQSAIAVYDSGDDYEAKQQFKLMFEKARLIGKGTTEPHPFLYKVFARSIPANAVEFYERYLIERKFYLTGLSNEIKKGNRVDVPFIRRDQNKWKTPAMKTLGRIYSEDLPVELPRQMFDNEIKSHLKSLPQMEGIDFNNANVTYLIAEYMKRVLDDDFQTFYQWNRNYRYMDMLKGEYDRKGSLQHCFTSVEEREGLWKERASRTERYRKQASNKIRSNRQMRNASSEEIETILDKRLSNSRNEYQKSEKVIRRYRVQDALLFLLAKKTLTELADFDGERFKLKEIMPDAEKGILSEIMPMSFTFEKGGKKYTITSEGMKLKNYGDFFVLASDKRIGNLLELVGSDIVSKEDSRGGGGSGGGGSTRGGRDHMVLHEYVNAAGITGGSGGRDHMVLHEYVNAAGITGGSGGRDHMVLHEYVNAAGITGGSGGRDHMVLHEYVNAAGITGGSGGRDHMVLHEYVNAAGITGGSGGRDHMVLHEYVNAAGITGGSGGRDHMVLHEYVNAAGIT

SEQ ID NO: 150 - protein, 1155 aa, Artificial Sequence
  chemically synthesized
MDYKDHDGDYKDHDIDYKDDDDKGGNSKKRSLEDNETEIKVSRDTWNTKNMRSLEPPRSKKRIHGGNIPALVENQKKYFGTYSVMAMLNAQTVLDHIQKVADIEGEQNENNENLWFHPVMSHLYNAKNGYDKQPEKTMFIIERLQSYFPFLKIMAENQREYSNGKYKQNRVEVNSNDIFEVLKRAFGVLKMYRDLTNHYKTYEEKLNDGCEFLTSTEQPLSGMINNYYTVALRNMNERYGYKTEDLAFIQDKRFKFVKDAYGKKKSQVNTGFFLSLQDYNGDTQKKLHLSGVGIALLICLFLDKQYINIFLSRLPIFSSYNAQSEERRIIIRSFGINSIKLPKDRIHSEKSNKSVAMDMLNEVKRCPDELFTTLSAEKQSRFRIISDDHNEVLMKRSSDRFVPLLLQYIDYGKLFDHIRFHVNMGKLRYLLKADKTCIDGQTRVRVIEQPLNGFGRLEEAETMRKQENGTFGNSGIRIRDFENMKRDDANPANYPYIVDTYTHYILENNKVEMFINDKEDSAPLLPVIEDDRYVVKTIPSCRMSTLEIPAMAFHMFLFGSKKTEKLIVDVHNRYKRLFQAMQKEEVTAENIASFGIAESDLPQKILDLISGNAHGKDVDAFIRLTVDDMLTDTERRIKRFKDDRKSIRSADNKMGKRGFKQISTGKLADFLAKDIVLFQPSVNDGENKITGLNYRIMQSAIAVYDSGDDYEAKQQFKLMFEKARLIGKGTTEPHPFLYKVFARSIPANAVEFYERYLIERKFYLTGLSNEIKKGNRVDVPFIRRDQNKWKTPAMKTLGRIYSEDLPVELPRQMFDNEIKSHLKSLPQMEGIDFNNANVTYLIAEYMKRVLDDDFQTFYQWNRNYRYMDMLKGEYDRKGSLQHCFTSVEEREGLWKERASRTERYRKQASNKIRSNRQMRNASSEEIETILDKRLSNSRNEYQKSEKVIRRYRVQDALLFLLAKKTLTELADFDGERFKLKEIMPDAEKGILSEIMPMSFTFEKGGKKYTITSEGMKLKNYGDFFVLASDKRIGNLLELVGSDIVSKEDIMEEFNKYDQCRPEISSIVFNLEKWAFDTYPELSARVDREEKVDFKSILKILLNNKNINKEQSDILRKIRNAFDHNNYPDKGVVEIKALPEIAMSIKKAFGEYAIMK

SEQ ID NO: 151 - protein, 1155 aa, Artificial Sequence
  chemically synthesized
MDYKDHDGDYKDHDIDYKDDDDKGGKSKKRSLEDNETEIEVSRDTWNNKNMRSLEPPRSKKRINGGNIPALVENQKKYFGTYSVMAMLNAQTVLDHIQKVADIEGEQNENNENLWFHPVMSHLYNAKNGYDKQPEKTMFIIERLQSYFPFLKIMAENQREYSNGKYKQNRVEVNSNDIFEVLKRAFGVLKMYRDLTNHYKTYEEKLNDGCEFLTSTEQPLSGMINNYYTVALRNMNERYGYKTEDLAFIQDKRFKFVKDAYGKKKSQVNTGFFLSLQDYNGDTQKKLHLSGVGIALLICLFLDKQYINIFLSRLPIFSSYNAQSEERRIIIRSFGINSIKLPKDRIHSEKSNKSVAMDMLNEVKRCPDELFTTLSAEKQSRFRIISDDHNEVLMKRSSDRFVPLLLQYIDYGKLFDHIRFHVNMGKLRYLLKADKTCIDGQTRVRVIEQPLNGFGRLEEAETMRKQENGTFGNSGIRIRDFENMKRDDANPANYPYIVDTYTHYILENNKVEMFINDKEDSAPLLPVIEDDRYVVKTIPSCRMSTLEIPAMAFHMFLFGSKKTEKLIVDVHNRYKRLFQAMQKEEVTAENIASFGIAESDLPQKILDLISGNAHGKDVDAFIRLTVDDMLTDTERRIKRFKDDRKSIRSADNKMGKRGFKQISTGKLADFLAKDIVLFQPSVNDGENKITGLNYRIMQSAIAVYDSGDDYEAKQQFKLMFEKARLIGKGTTEPHPFLYKVFARSIPANAVEFYERYLIERKFYLTGLSNEIKKGNRVDVPFIRRDQNKWKTPAMKTLGRIYSEDLPVELPRQMFDNEIKSHLKSLPQMEGIDFNNANVTYLIAEYMKRVLDDDFQTFYQWNRNYRYMDMLKGEYDRKGSLQHCFTSVEEREGLWKERASRTERYRKQASNKIRSNRQMRNASSEEIETILDKRLSNSRNEYQKSEKVIRRYRVQDALLFLLAKKTLTELADFDGERFKLKEIMPDAEKGILSEIMPMSFTFEKGGKKYTITSEGMKLKNYGDFFVLASDKRIGNLLELVGSDIVSKEDIMEEFNKYDQCRPEISSIVFNLEKWAFDTYPELSARVDREEKVDFKSILKILLNNKNINKEQSDILRKIRNAFDHNNYPDKGVVEIKALPEIAMSIKKAFGEYAIMK

SEQ ID NO: 152 - protein, 1127 aa, Artificial Sequence
  chemically synthesized
MDYKDHDGDYKDHDIDYKDDDDKGGLQLPPLERLTLGGNIPALVENQKKYFGTYSVMAMLNAQTVLDHIQKVADIEGEQNENNENLWFHPVMSHLYNAKNGYDKQPEKTMFIIERLQSYFPFLKIMAENQREYSNGKYKQNRVEVNSNDIFEVLKRAFGVLKMYRDLTNHYKTYEEKLNDGCEFLTSTEQPLSGMINNYYTVALRNMNERYGYKTEDLAFIQDKRFKFVKDAYGKKKSQVNTGFFLSLQDYNGDTQKKLHLSGVGIALLICLFLDKQYINIFLSRLPIFSSYNAQSEERRIIIRSFGINSIKLPKDRIHSEKSNKSVAMDMLNEVKRCPDELFTTLSAEKQSRFRIISDDHNEVLMKRSSDRFVPLLLQYIDYGKLFDHIRFHVNMGKLRYLLKADKTCIDGQTRVRVIEQPLNGFGRLEEAETMRKQENGTFGNSGIRIRDFENMKRDDANPANYPYIVDTYTHYILENNKVEMFINDKEDSAPLLPVIEDDRYVVKTIPSCRMSTLEIPAMAFHMFLFGSKKTEKLIVDVHNRYKRLFQAMQKEEVTAENIASFGIAESDLPQKILDLISGNAHGKDVDAFIRLTVDDMLTDTERRIKRFKDDRKSIRSADNKMGKRGFKQISTGKLADFLAKDIVLFQPSVNDGENKITGLNYRIMQSAIAVYDSGDDYEAKQQFKLMFEKARLIGKGTTEPHPFLYKVFARSIPANAVEFYERYLIERKFYLTGLSNEIKKGNRVDVPFIRRDQNKWKTPAMKTLGRIYSEDLPVELPRQMFDNEIKSHLKSLPQMEGIDFNNANVTYLIAEYMKRVLDDDFQTFYQWNRNYRYMDMLKGEYDRKGSLQHCFTSVEEREGLWKERASRTERYRKQASNKIRSNRQMRNASSEEIETILDKRLSNSRNEYQKSEKVIRRYRVQDALLFLLAKKTLTELADFDGERFKLKEIMPDAEKGILSEIMPMSFTFEKGGKKYTITSEGMKLKNYGDFFVLASDKRIGNLLELVGSDIVSKEDIMEEFNKYDQCRPEISSIVFNLEKWAFDTYPELSARVDREEKVDFKSILKILLNNKNINKEQSDILRKIRNAFDHNNYPDKGVVEIKALPEIAMSIKKAFGEYAIMK

SEQ ID NO: 153 - protein, 1132 aa, Artificial Sequence
  chemically synthesized
MDYKDHDGDYKDHDIDYKDDDDKGGGSLQLPPLERLTLGSSGGNIPALVENQKKYFGTYSVMAMLNAQTVLDHIQKVADIEGEQNENNENLWFHPVMSHLYNAKNGYDKQPEKTMFIIERLQSYFPFLKIMAENQREYSNGKYKQNRVEVNSNDIFEVLKRAFGVLKMYRDLTNHYKTYEEKLNDGCEFLTSTEQPLSGMINNYYTVALRNMNERYGYKTEDLAFIQDKRFKFVKDAYGKKKSQVNTGFFLSLQDYNGDTQKKLHLSGVGIALLICLFLDKQYINIFLSRLPIFSSYNAQSEERRIIIRSFGINSIKLPKDRIHSEKSNKSVAMDMLNEVKRCPDELFTTLSAEKQSRFRIISDDHNEVLMKRSSDRFVPLLLQYIDYGKLFDHIRFHVNMGKLRYLLKADKTCIDGQTRVRVIEQPLNGFGRLEEAETMRKQENGTFGNSGIRIRDFENMKRDDANPANYPYIVDTYTHYILENNKVEMFINDKEDSAPLLPVIEDDRYVVKTIPSCRMSTLEIPAMAFHMFLFGSKKTEKLIVDVHNRYKRLFQAMQKEEVTAENIASFGIAESDLPQKILDLISGNAHGKDVDAFIRLTVDDMLTDTERRIKRFKDDRKSIRSADNKMGKRGFKQISTGKLADFLAKDIVLFQPSVNDGENKITGLNYRIMQSAIAVYDSGDDYEAKQQFKLMFEKARLIGKGTTEPHPFLYKVFARSIPANAVEFYERYLIERKFYLTGLSNEIKKGNRVDVPFIRRDQNKWKTPAMKTLGRIYSEDLPVELPRQMFDNEIKSHLKSLPQMEGIDFNNANVTYLIAEYMKRVLDDDFQTFYQWNRNYRYMDMLKGEYDRKGSLQHCFTSVEEREGLWKERASRTERYRKQASNKIRSNRQMRNASSEEIETILDKRLSNSRNEYQKSEKVIRRYRVQDALLFLLAKKTLTELADFDGERFKLKEIMPDAEKGILSEIMPMSFTFEKGGKKYTITSEGMKLKNYGDFFVLASDKRIGNLLELVGSDIVSKEDIMEEFNKYDQCRPEISSIVFNLEKWAFDTYPELSARVDREEKVDFKSILKILLNNKNINKEQSDILRKIRNAFDHNNYPDKGVVEIKALPEIAMSIKKAFGEYAIMK

SEQ ID NO: 154 - protein, 1148 aa, Artificial Sequence
  chemically synthesized
MDYKDHDGDYKDHDIDYKDDDDKGGMSVLTPLLLRGLTGSARRLPVPRAKIHSLGDPGGNIPALVENQKKYFGTYSVMAMLNAQTVLDHIQKVADIEGEQNENNENLWFHPVMSHLYNAKNGYDKQPEKTMFIIERLQSYFPFLKIMAENQREYSNGKYKQNRVEVNSNDIFEVLKRAFGVLKMYRDLTNHYKTYEEKLNDGCEFLTSTEQPLSGMINNYYTVALRNMNERYGYKTEDLAFIQDKRFKFVKDAYGKKKSQVNTGFFLSLQDYNGDTQKKLHLSGVGIALLICLFLDKQYINIFLSRLPIFSSYNAQSEERRIIIRSFGINSIKLPKDRIHSEKSNKSVAMDMLNEVKRCPDELFTTLSAEKQSRFRIISDDHNEVLMKRSSDRFVPLLLQYIDYGKLFDHIRFHVNMGKLRYLLKADKTCIDGQTRVRVIEQPLNGFGRLEEAETMRKQENGTFGNSGIRIRDFENMKRDDANPANYPYIVDTYTHYILENNKVEMFINDKEDSAPLLPVIEDDRYVVKTIPSCRMSTLEIPAMAFHMFLFGSKKTEKLIVDVHNRYKRLFQAMQKEEVTAENIASFGIAESDLPQKILDLISGNAHGKDVDAFIRLTVDDMLTDTERRIKRFKDDRKSIRSADNKMGKRGFKQISTGKLADFLAKDIVLFQPSVNDGENKITGLNYRIMQSAIAVYDSGDDYEAKQQFKLMFEKARLIGKGTTEPHPFLYKVFARSIPANAVEFYERYLIERKFYLTGLSNEIKKGNRVDVPFIRRDQNKWKTPAMKTLGRIYSEDLPVELPRQMFDNEIKSHLKSLPQMEGIDFNNANVTYLIAEYMKRVLDDDFQTFYQWNRNYRYMDMLKGEYDRKGSLQHCFTSVEEREGLWKERASRTERYRKQASNKIRSNRQMRNASSEEIETILDKRLSNSRNEYQKSEKVIRRYRVQDALLFLLAKKTLTELADFDGERFKLKEIMPDAEKGILSEIMPMSFTFEKGGKKYTITSEGMKLKNYGDFFVLASDKRIGNLLELVGSDIVSKEDIMEEFNKYDQCRPEISSIVFNLEKWAFDTYPELSARVDREEKVDFKSILKILLNNKNINKEQSDILRKIRNAFDHNNYPDKGVVEIKALPEIAMSIKKAFGEYAIMK

SEQ ID NO: 155 - protein, 1246 aa, Artificial Sequence
  chemically synthesized
MDYKDHDGDYKDHDIDYKDDDDKGGMSVLTPLLLRGLTGSARRLPVPRAKIHSLGDPMSVLTPLLLRGLTGSARRLPVPRAKIHSLGKLATMSVLTPLLLRGLTGSARRLPVPRAKIHSLGDPMSVLTPLLLRGLTGSARRLPVPRAKIHSLGKLGGNIPALVENQKKYFGTYSVMAMLNAQTVLDHIQKVADIEGEQNENNENLWFHPVMSHLYNAKNGYDKQPEKTMFIIERLQSYFPFLKIMAENQREYSNGKYKQNRVEVNSNDIFEVLKRAFGVLKMYRDLTNHYKTYEEKLNDGCEFLTSTEQPLSGMINNYYTVALRNMNERYGYKTEDLAFIQDKRFKFVKDAYGKKKSQVNTGFFLSLQDYNGDTQKKLHLSGVGIALLICLFLDKQYINIFLSRLPIFSSYNAQSEERRIIIRSFGINSIKLPKDRIHSEKSNKSVAMDMLNEVKRCPDELFTTLSAEKQSRFRIISDDHNEVLMKRSSDRFVPLLLQYIDYGKLFDHIRFHVNMGKLRYLLKADKTCIDGQTRVRVIEQPLNGFGRLEEAETMRKQENGTFGNSGIRIRDFENMKRDDANPANYPYIVDTYTHYILENNKVEMFINDKEDSAPLLPVIEDDRYVVKTIPSCRMSTLEIPAMAFHMFLFGSKKTEKLIVDVHNRYKRLFQAMQKEEVTAENIASFGIAESDLPQKILDLISGNAHGKDVDAFIRLTVDDMLTDTERRIKRFKDDRKSIRSADNKMGKRGFKQISTGKLADFLAKDIVLFQPSVNDGENKITGLNYRIMQSAIAVYDSGDDYEAKQQFKLMFEKARLIGKGTTEPHPFLYKVFARSIPANAVEFYERYLIERKFYLTGLSNEIKKGNRVDVPFIRRDQNKWKTPAMKTLGRIYSEDLPVELPRQMFDNEIKSHLKSLPQMEGIDFNNANVTYLIAEYMKRVLDDDFQTFYQWNRNYRYMDMLKGEYDRKGSLQHCFTSVEEREGLWKERASRTERYRKQASNKIRSNRQMRNASSEEIETILDKRLSNSRNEYQKSEKVIRRYRVQDALLFLLAKKTLTELADFDGERFKLKEIMPDAEKGILSEIMPMSFTFEKGGKKYTITSEGMKLKNYGDFFVLASDKRIGNLLELVGSDIVSKEDIMEEFNKYDQCRPEISSIVFNLEKWAFDTYPELSARVDREEKVDFKSILKILLNNKNINKEQSDILRKIRNAFDHNNYPDKGVVEIKALPEIAMSIKKAFGEYAIMK

SEQ ID NO: 156 - protein, 1137 aa, Artificial Sequence
  chemically synthesized
MDYKDHDGDYKDHDIDYKDDDDKGGMYRMQLLSCIALSLALVTNSLGGNIPALVENQKKYFGTYSVMAMLNAQTVLDHIQKVADIEGEQNENNENLWFHPVMSHLYNAKNGYDKQPEKTMFIIERLQSYFPFLKIMAENQREYSNGKYKQNRVEVNSNDIFEVLKRAFGVLKMYRDLTNHYKTYEEKLNDGCEFLTSTEQPLSGMINNYYTVALRNMNERYGYKTEDLAFIQDKRFKFVKDAYGKKKSQVNTGFFLSLQDYNGDTQKKLHLSGVGIALLICLFLDKQYINIFLSRLPIFSSYNAQSEERRIIIRSFGINSIKLPKDRIHSEKSNKSVAMDMLNEVKRCPDELFTTLSAEKQSRFRIISDDHNEVLMKRSSDRFVPLLLQYIDYGKLFDHIRFHVNMGKLRYLLKADKTCIDGQTRVRVIEQPLNGFGRLEEAETMRKQENGTFGNSGIRIRDFENMKRDDANPANYPYIVDTYTHYILENNKVEMFINDKEDSAPLLPVIEDDRYVVKTIPSCRMSTLEIPAMAFHMFLFGSKKTEKLIVDVHNRYKRLFQAMQKEEVTAENIASFGIAESDLPQKILDLISGNAHGKDVDAFIRLTVDDMLTDTERRIKRFKDDRKSIRSADNKMGKRGFKQISTGKLADFLAKDIVLFQPSVNDGENKITGLNYRIMQSAIAVYDSGDDYEAKQQFKLMFEKARLIGKGTTEPHPFLYKVFARSIPANAVEFYERYLIERKFYLTGLSNEIKKGNRVDVPFIRRDQNKWKTPAMKTLGRIYSEDLPVELPRQMFDNEIKSHLKSLPQMEGIDFNNANVTYLIAEYMKRVLDDDFQTFYQWNRNYRYMDMLKGEYDRKGSLQHCFTSVEEREGLWKERASRTERYRKQASNKIRSNRQMRNASSEEIETILDKRLSNSRNEYQKSEKVIRRYRVQDALLFLLAKKTLTELADFDGERFKLKEIMPDAEKGILSEIMPMSFTFEKGGKKYTITSEGMKLKNYGDFFVLASDKRIGNLLELVGSDIVSKEDIMEEFNKYDQCRPEISSIVFNLEKWAFDTYPELSARVDREEKVDFKSILKILLNNKNINKEQSDILRKIRNAFDHNNYPDKGVVEIKALPEIAMSIKKAFGEYAIMK

SEQ ID NO: 157 - protein, 1159 aa, Artificial Sequence
  chemically synthesized
MDYKDHDGDYKDHDIDYKDDDDKGGMGCCFSKTAAKGEAAAERPGEAAVASSPSKANGQENGHVKVGSGGNIPALVENQKKYFGTYSVMAMLNAQTVLDHIQKVADIEGEQNENNENLWFHPVMSHLYNAKNGYDKQPEKTMFIIERLQSYFPFLKIMAENQREYSNGKYKQNRVEVNSNDIFEVLKRAFGVLKMYRDLTNHYKTYEEKLNDGCEFLTSTEQPLSGMINNYYTVALRNMNERYGYKTEDLAFIQDKRFKFVKDAYGKKKSQVNTGFFLSLQDYNGDTQKKLHLSGVGIALLICLFLDKQYINIFLSRLPIFSSYNAQSEERRIIIRSFGINSIKLPKDRIHSEKSNKSVAMDMLNEVKRCPDELFTTLSAEKQSRFRIISDDHNEVLMKRSSDRFVPLLLQYIDYGKLFDHIRFHVNMGKLRYLLKADKTCIDGQTRVRVIEQPLNGFGRLEEAETMRKQENGTFGNSGIRIRDFENMKRDDANPANYPYIVDTYTHYILENNKVEMFINDKEDSAPLLPVIEDDRYVVKTIPSCRMSTLEIPAMAFHMFLFGSKKTEKLIVDVHNRYKRLFQAMQKEEVTAENIASFGIAESDLPQKILDLISGNAHGKDVDAFIRLTVDDMLTDTERRIKRFKDDRKSIRSADNKMGKRGFKQISTGKLADFLAKDIVLFQPSVNDGENKITGLNYRIMQSAIAVYDSGDDYEAKQQFKLMFEKARLIGKGTTEPHPFLYKVFARSIPANAVEFYERYLIERKFYLTGLSNEIKKGNRVDVPFIRRDQNKWKTPAMKTLGRIYSEDLPVELPRQMFDNEIKSHLKSLPQMEGIDFNNANVTYLIAEYMKRVLDDDFQTFYQWNRNYRYMDMLKGEYDRKGSLQHCFTSVEEREGLWKERASRTERYRKQASNKIRSNRQMRNASSEEIETILDKRLSNSRNEYQKSEKVIRRYRVQDALLFLLAKKTLTELADFDGERFKLKEIMPDAEKGILSEIMPMSFTFEKGGKKYTITSEGMKLKNYGDFFVLASDKRIGNLLELVGSDIVSKEDIMEEFNKYDQCRPEISSIVFNLEKWAFDTYPELSARVDREEKVDFKSILKILLNNKNINKEQSDILRKIRNAFDHNNYPDKGVVEIKALPEIAMSIKKAFGEYAIMK

SEQ ID NO: 158 - protein, 1133 aa, Artificial Sequence
  chemically synthesized
MDYKDHDGDYKDHDIDYKDDDDKGGMLLPVPLLLGLLGAAADGGNIPALVENQKKYFGTYSVMAMLNAQTVLDHIQKVADIEGEQNENNENLWFHPVMSHLYNAKNGYDKQPEKTMFIIERLQSYFPFLKIMAENQREYSNGKYKQNRVEVNSNDIFEVLKRAFGVLKMYRDLTNHYKTYEEKLNDGCEFLTSTEQPLSGMINNYYTVALRNMNERYGYKTEDLAFIQDKRFKFVKDAYGKKKSQVNTGFFLSLQDYNGDTQKKLHLSGVGIALLICLFLDKQYINIFLSRLPIFSSYNAQSEERRIIIRSFGINSIKLPKDRIHSEKSNKSVAMDMLNEVKRCPDELFTTLSAEKQSRFRIISDDHNEVLMKRSSDRFVPLLLQYIDYGKLFDHIRFHVNMGKLRYLLKADKTCIDGQTRVRVIEQPLNGFGRLEEAETMRKQENGTFGNSGIRIRDFENMKRDDANPANYPYIVDTYTHYILENNKVEMFINDKEDSAPLLPVIEDDRYVVKTIPSCRMSTLEIPAMAFHMFLFGSKKTEKLIVDVHNRYKRLFQAMQKEEVTAENIASFGIAESDLPQKILDLISGNAHGKDVDAFIRLTVDDMLTDTERRIKRFKDDRKSIRSADNKMGKRGFKQISTGKLADFLAKDIVLFQPSVNDGENKITGLNYRIMQSAIAVYDSGDDYEAKQQFKLMFEKARLIGKGTTEPHPFLYKVFARSIPANAVEFYERYLIERKFYLTGLSNEIKKGNRVDVPFIRRDQNKWKTPAMKTLGRIYSEDLPVELPRQMFDNEIKSHLKSLPQMEGIDFNNANVTYLIAEYMKRVLDDDFQTFYQWNRNYRYMDMLKGEYDRKGSLQHCFTSVEEREGLWKERASRTERYRKQASNKIRSNRQMRNASSEEIETILDKRLSNSRNEYQKSEKVIRRYRVQDALLFLLAKKTLTELADFDGERFKLKEIMPDAEKGILSEIMPMSFTFEKGGKKYTITSEGMKLKNYGDFFVLASDKRIGNLLELVGSDIVSKEDIMEEFNKYDQCRPEISSIVFNLEKWAFDTYPELSARVDREEKVDFKSILKILLNNKNINKEQSDILRKIRNAFDHNNYPDKGVVEIKALPEIAMSIKKAFGEYAIMK

SEQ ID NO: 159 - protein, 1125 aa, Artificial Sequence
  chemically synthesized
MDYKDHDGDYKDHDIDYKDDDDKGGGITLGKDELGGNIPALVENQKKYFGTYSVMAMLNAQTVLDHIQKVADIEGEQNENNENLWFHPVMSHLYNAKNGYDKQPEKTMFIIERLQSYFPFLKIMAENQREYSNGKYKQNRVEVNSNDIFEVLKRAFGVLKMYRDLTNHYKTYEEKLNDGCEFLTSTEQPLSGMINNYYTVALRNMNERYGYKTEDLAFIQDKRFKFVKDAYGKKKSQVNTGFFLSLQDYNGDTQKKLHLSGVGIALLICLFLDKQYINIFLSRLPIFSSYNAQSEERRIIIRSFGINSIKLPKDRIHSEKSNKSVAMDMLNEVKRCPDELFTTLSAEKQSRFRIISDDHNEVLMKRSSDRFVPLLLQYIDYGKLFDHIRFHVNMGKLRYLLKADKTCIDGQTRVRVIEQPLNGFGRLEEAETMRKQENGTFGNSGIRIRDFENMKRDDANPANYPYIVDTYTHYILENNKVEMFINDKEDSAPLLPVIEDDRYVVKTIPSCRMSTLEIPAMAFHMFLFGSKKTEKLIVDVHNRYKRLFQAMQKEEVTAENIASFGIAESDLPQKILDLISGNAHGKDVDAFIRLTVDDMLTDTERRIKRFKDDRKSIRSADNKMGKRGFKQISTGKLADFLAKDIVLFQPSVNDGENKITGLNYRIMQSAIAVYDSGDDYEAKQQFKLMFEKARLIGKGTTEPHPFLYKVFARSIPANAVEFYERYLIERKFYLTGLSNEIKKGNRVDVPFIRRDQNKWKTPAMKTLGRIYSEDLPVELPRQMFDNEIKSHLKSLPQMEGIDFNNANVTYLIAEYMKRVLDDDFQTFYQWNRNYRYMDMLKGEYDRKGSLQHCFTSVEEREGLWKERASRTERYRKQASNKIRSNRQMRNASSEEIETILDKRLSNSRNEYQKSEKVIRRYRVQDALLFLLAKKTLTELADFDGERFKLKEIMPDAEKGILSEIMPMSFTFEKGGKKYTITSEGMKLKNYGDFFVLASDKRIGNLLELVGSDIVSKEDIMEEFNKYDQCRPEISSIVFNLEKWAFDTYPELSARVDREEKVDFKSILKILLNNKNINKEQSDILRKIRNAFDHNNYPDKGVVEIKALPEIAMSIKKAFGEYAIMK

SEQ ID NO: 160 - protein, 1119 aa, Artificial Sequence
  chemically synthesized
MDYKDHDGDYKDHDIDYKDDDDKGGSKLGGNIPALVENQKKYFGTYSVMAMLNAQTVLDHIQKVADIEGEQNENNENLWFHPVMSHLYNAKNGYDKQPEKTMFIIERLQSYFPFLKIMAENQREYSNGKYKQNRVEVNSNDIFEVLKRAFGVLKMYRDLTNHYKTYEEKLNDGCEFLTSTEQPLSGMINNYYTVALRNMNERYGYKTEDLAFIQDKRFKFVKDAYGKKKSQVNTGFFLSLQDYNGDTQKKLHLSGVGIALLICLFLDKQYINIFLSRLPIFSSYNAQSEERRIIIRSFGINSIKLPKDRIHSEKSNKSVAMDMLNEVKRCPDELFTTLSAEKQSRFRIISDDHNEVLMKRSSDRFVPLLLQYIDYGKLFDHIRFHVNMGKLRYLLKADKTCIDGQTRVRVIEQPLNGFGRLEEAETMRKQENGTFGNSGIRIRDFENMKRDDANPANYPYIVDTYTHYILENNKVEMFINDKEDSAPLLPVIEDDRYVVKTIPSCRMSTLEIPAMAFHMFLFGSKKTEKLIVDVHNRYKRLFQAMQKEEVTAENIASFGIAESDLPQKILDLISGNAHGKDVDAFIRLTVDDMLTDTERRIKRFKDDRKSIRSADNKMGKRGFKQISTGKLADFLAKDIVLFQPSVNDGENKITGLNYRIMQSAIAVYDSGDDYEAKQQFKLMFEKARLIGKGTTEPHPFLYKVFARSIPANAVEFYERYLIERKFYLTGLSNEIKKGNRVDVPFIRRDQNKWKTPAMKTLGRIYSEDLPVELPRQMFDNEIKSHLKSLPQMEGIDFNNANVTYLIAEYMKRVLDDDFQTFYQWNRNYRYMDMLKGEYDRKGSLQHCFTSVEEREGLWKERASRTERYRKQASNKIRSNRQMRNASSEEIETILDKRLSNSRNEYQKSEKVIRRYRVQDALLFLLAKKTLTELADFDGERFKLKEIMPDAEKGILSEIMPMSFTFEKGGKKYTITSEGMKLKNYGDFFVLASDKRIGNLLELVGSDIVSKEDIMEEFNKYDQCRPEISSIVFNLEKWAFDTYPELSARVDREEKVDFKSILKILLNNKNINKEQSDILRKIRNAFDHNNYPDKGVVEIKALPEIAMSIKKAFGEYAIMK

SEQ ID NO: 161 - protein, 1048 aa, Artificial Sequence
  chemically synthesized
MDYKDHDGDYKDHDIDYKDDDDKGGNSKKRSLEDNETEIKVSRDTWNTKNMRSLEPPRSKKRIHGGNIPALVENQKKYFGTYSVMAMLNAQTVLDHIQKVADIEGEQNENNENLWFHPVMSHLYNAKNGYDKQPEKTMFIIERLQSYFPFLKIMAENQREYSNGKYKQNRVEVNSNDIFEVLKRAFGVLKMYRDLTNHYKTYEEKLNDGCEFLTSTEQPLSGMINNYYTVALRNMNERYGYKTEDLAFIQDKRFKFVKDAYGKKKSQVNTGFFLSLQDYNGDTQKKLHLSGVGIALLICLFLDKQYINIFLSRLPIFSSYNAQSEERRIIIRSFGINSIKLPKDRIHSEKSNKSVAMDMLNEVKRCPDELFTTLSAEKQSRFRIISDDHNEVLMKRSSDRFVPLLLQYIDYGKLFDHIRFHVNMGKLRYLLKADKTCIDGQTRVRVIEQPLNGFGRLEEAETMRKQENGTFGNSGIRIRDFENMKRDDANPANYPYIVDTYTHYILENNKVEMFINDKEDSAPLLPVIEDDRYVVKTIPSCRMSTLEIPAMAFHMFLFGSKKTEKLIVDVHNRYKRLFQAMQKEEVTAENIASFGIAESDLPQKILDLISGNAHGKDVDAFIRLTVDDMLTDTERRIKRFKDDRKSIRSADNKMGKRGFKQISTGKLADFLAKDIVLFQPSVNDGENKITGLNYRIMQSAIAVYDSGDDYEAKQQFKLMFEKARLIGKGTTEPHPFLYKVFARSIPANAVEFYERYLIERKFYLTGLSNEIKKGNRVDVPFIRRDQNKWKTPAMKTLGRIYSEDLPVELPRQMFDNEIKSHLKSLPQMEGIDFNNANVTYLIAEYMKRVLDDDFQTFYQWNRNYRYMDMLKGEYDRKGSLQHCFTSVEEREGLWKERASRTERYRKQASNKIRSNRQMRNASSEEIETILDKRLSNSRNEYQKSEKVIRRYRVQDALLFLLAKKTLTELADFDGERFKLKEIMPDAEKGILSEIMPMSFTFEKGGKKYTITSEGMKLKNYGDFFVLASDKRIGNLLELVGSDIVSKED

SEQ ID NO: 162 - protein, 1048 aa, Artificial Sequence
  chemically synthesized
MDYKDHDGDYKDHDIDYKDDDDKGGKSKKRSLEDNETEIEVSRDTWNNKNMRSLEPPRSKKRINGGNIPALVENQKKYFGTYSVMAMLNAQTVLDHIQKVADIEGEQNENNENLWFHPVMSHLYNAKNGYDKQPEKTMFIIERLQSYFPFLKIMAENQREYSNGKYKQNRVEVNSNDIFEVLKRAFGVLKMYRDLTNHYKTYEEKLNDGCEFLTSTEQPLSGMINNYYTVALRNMNERYGYKTEDLAFIQDKRFKFVKDAYGKKKSQVNTGFFLSLQDYNGDTQKKLHLSGVGIALLICLFLDKQYINIFLSRLPIFSSYNAQSEERRIIIRSFGINSIKLPKDRIHSEKSNKSVAMDMLNEVKRCPDELFTTLSAEKQSRFRIISDDHNEVLMKRSSDRFVPLLLQYIDYGKLFDHIRFHVNMGKLRYLLKADKTCIDGQTRVRVIEQPLNGFGRLEEAETMRKQENGTFGNSGIRIRDFENMKRDDANPANYPYIVDTYTHYILENNKVEMFINDKEDSAPLLPVIEDDRYVVKTIPSCRMSTLEIPAMAFHMFLFGSKKTEKLIVDVHNRYKRLFQAMQKEEVTAENIASFGIAESDLPQKILDLISGNAHGKDVDAFIRLTVDDMLTDTERRIKRFKDDRKSIRSADNKMGKRGFKQISTGKLADFLAKDIVLFQPSVNDGENKITGLNYRIMQSAIAVYDSGDDYEAKQQFKLMFEKARLIGKGTTEPHPFLYKVFARSIPANAVEFYERYLIERKFYLTGLSNEIKKGNRVDVPFIRRDQNKWKTPAMKTLGRIYSEDLPVELPRQMFDNEIKSHLKSLPQMEGIDFNNANVTYLIAEYMKRVLDDDFQTFYQWNRNYRYMDMLKGEYDRKGSLQHCFTSVEEREGLWKERASRTERYRKQASNKIRSNRQMRNASSEEIETILDKRLSNSRNEYQKSEKVIRRYRVQDALLFLLAKKTLTELADFDGERFKLKEIMPDAEKGILSEIMPMSFTFEKGGKKYTITSEGMKLKNYGDFFVLASDKRIGNLLELVGSDIVSKED

SEQ ID NO: 163 - protein, 1020 aa, Artificial Sequence
  chemically synthesized
MDYKDHDGDYKDHDIDYKDDDDKGGLQLPPLERLTLGGNIPALVENQKKYFGTYSVMAMLNAQTVLDHIQKVADIEGEQNENNENLWFHPVMSHLYNAKNGYDKQPEKTMFIIERLQSYFPFLKIMAENQREYSNGKYKQNRVEVNSNDIFEVLKRAFGVLKMYRDLTNHYKTYEEKLNDGCEFLTSTEQPLSGMINNYYTVALRNMNERYGYKTEDLAFIQDKRFKFVKDAYGKKKSQVNTGFFLSLQDYNGDTQKKLHLSGVGIALLICLFLDKQYINIFLSRLPIFSSYNAQSEERRIIIRSFGINSIKLPKDRIHSEKSNKSVAMDMLNEVKRCPDELFTTLSAEKQSRFRIISDDHNEVLMKRSSDRFVPLLLQYIDYGKLFDHIRFHVNMGKLRYLLKADKTCIDGQTRVRVIEQPLNGFGRLEEAETMRKQENGTFGNSGIRIRDFENMKRDDANPANYPYIVDTYTHYILENNKVEMFINDKEDSAPLLPVIEDDRYVVKTIPSCRMSTLEIPAMAFHMFLFGSKKTEKLIVDVHNRYKRLFQAMQKEEVTAENIASFGIAESDLPQKILDLISGNAHGKDVDAFIRLTVDDMLTDTERRIKRFKDDRKSIRSADNKMGKRGFKQISTGKLADFLAKDIVLFQPSVNDGENKITGLNYRIMQSAIAVYDSGDDYEAKQQFKLMFEKARLIGKGTTEPHPFLYKVFARSIPANAVEFYERYLIERKFYLTGLSNEIKKGNRVDVPFIRRDQNKWKTPAMKTLGRIYSEDLPVELPRQMFDNEIKSHLKSLPQMEGIDFNNANVTYLIAEYMKRVLDDDFQTFYQWNRNYRYMDMLKGEYDRKGSLQHCFTSVEEREGLWKERASRTERYRKQASNKIRSNRQMRNASSEEIETILDKRLSNSRNEYQKSEKVIRRYRVQDALLFLLAKKTLTELADFDGERFKLKEIMPDAEKGILSEIMPMSFTFEKGGKKYTITSEGMKLKNYGDFFVLASDKRIGNLLELVGSDIVSKED

SEQ ID NO: 164 - protein, 1025 aa, Artificial Sequence
  chemically synthesized
MDYKDHDGDYKDHDIDYKDDDDKGGGSLQLPPLERLTLGSSGGNIPALVENQKKYFGTYSVMAMLNAQTVLDHIQKVADIEGEQNENNENLWFHPVMSHLYNAKNGYDKQPEKTMFIIERLQSYFPFLKIMAENQREYSNGKYKQNRVEVNSNDIFEVLKRAFGVLKMYRDLTNHYKTYEEKLNDGCEFLTSTEQPLSGMINNYYTVALRNMNERYGYKTEDLAFIQDKRFKFVKDAYGKKKSQVNTGFFLSLQDYNGDTQKKLHLSGVGIALLICLFLDKQYINIFLSRLPIFSSYNAQSEERRIIIRSFGINSIKLPKDRIHSEKSNKSVAMDMLNEVKRCPDELFTTLSAEKQSRFRIISDDHNEVLMKRSSDRFVPLLLQYIDYGKLFDHIRFHVNMGKLRYLLKADKTCIDGQTRVRVIEQPLNGFGRLEEAETMRKQENGTFGNSGIRIRDFENMKRDDANPANYPYIVDTYTHYILENNKVEMFINDKEDSAPLLPVIEDDRYVVKTIPSCRMSTLEIPAMAFHMFLFGSKKTEKLIVDVHNRYKRLFQAMQKEEVTAENIASFGIAESDLPQKILDLISGNAHGKDVDAFIRLTVDDMLTDTERRIKRFKDDRKSIRSADNKMGKRGFKQISTGKLADFLAKDIVLFQPSVNDGENKITGLNYRIMQSAIAVYDSGDDYEAKQQFKLMFEKARLIGKGTTEPHPFLYKVFARSIPANAVEFYERYLIERKFYLTGLSNEIKKGNRVDVPFIRRDQNKWKTPAMKTLGRIYSEDLPVELPRQMFDNEIKSHLKSLPQMEGIDFNNANVTYLIAEYMKRVLDDDFQTFYQWNRNYRYMDMLKGEYDRKGSLQHCFTSVEEREGLWKERASRTERYRKQASNKIRSNRQMRNASSEEIETILDKRLSNSRNEYQKSEKVIRRYRVQDALLFLLAKKTLTELADFDGERFKLKEIMPDAEKGILSEIMPMSFTFEKGGKKYTITSEGMKLKNYGDFFVLASDKRIGNLLELVGSDIVSKED

SEQ ID NO: 165 - protein, 1041 aa, Artificial Sequence
  chemically synthesized
MDYKDHDGDYKDHDIDYKDDDDKGGMSVLTPLLLRGLTGSARRLPVPRAKIHSLGDPGGNIPALVENQKKYFGTYSVMAMLNAQTVLDHIQKVADIEGEQNENNENLWFHPVMSHLYNAKNGYDKQPEKTMFIIERLQSYFPFLKIMAENQREYSNGKYKQNRVEVNSNDIFEVLKRAFGVLKMYRDLTNHYKTYEEKLNDGCEFLTSTEQPLSGMINNYYTVALRNMNERYGYKTEDLAFIQDKRFKFVKDAYGKKKSQVNTGFFLSLQDYNGDTQKKLHLSGVGIALLICLFLDKQYINIFLSRLPIFSSYNAQSEERRIIIRSFGINSIKLPKDRIHSEKSNKSVAMDMLNEVKRCPDELFTTLSAEKQSRFRIISDDHNEVLMKRSSDRFVPLLLQYIDYGKLFDHIRFHVNMGKLRYLLKADKTCIDGQTRVRVIEQPLNGFGRLEEAETMRKQENGTFGNSGIRIRDFENMKRDDANPANYPYIVDTYTHYILENNKVEMFINDKEDSAPLLPVIEDDRYVVKTIPSCRMSTLEIPAMAFHMFLFGSKKTEKLIVDVHNRYKRLFQAMQKEEVTAENIASFGIAESDLPQKILDLISGNAHGKDVDAFIRLTVDDMLTDTERRIKRFKDDRKSIRSADNKMGKRGFKQISTGKLADFLAKDIVLFQPSVNDGENKITGLNYRIMQSAIAVYDSGDDYEAKQQFKLMFEKARLIGKGTTEPHPFLYKVFARSIPANAVEFYERYLIERKFYLTGLSNEIKKGNRVDVPFIRRDQNKWKTPAMKTLGRIYSEDLPVELPRQMFDNEIKSHLKSLPQMEGIDFNNANVTYLIAEYMKRVLDDDFQTFYQWNRNYRYMDMLKGEYDRKGSLQHCFTSVEEREGLWKERASRTERYRKQASNKIRSNRQMRNASSEEIETILDKRLSNSRNEYQKSEKVIRRYRVQDALLFLLAKKTLTELADFDGERFKLKEIMPDAEKGILSEIMPMSFTFEKGGKKYTITSEGMKLKNYGDFFVLASDKRIGNLLELVGSDIVSKED

SEQ ID NO: 166 - protein, 1139 aa, Artificial Sequence
  chemically synthesized
MDYKDHDGDYKDHDIDYKDDDDKGGMSVLTPLLLRGLTGSARRLPVPRAKIHSLGDPMSVLTPLLLRGLTGSARRLPVPRAKIHSLGKLATMSVLTPLLLRGLTGSARRLPVPRAKIHSLGDPMSVLTPLLLRGLTGSARRLPVPRAKIHSLGKLGGNIPALVENQKKYFGTYSVMAMLNAQTVLDHIQKVADIEGEQNENNENLWFHPVMSHLYNAKNGYDKQPEKTMFIIERLQSYFPFLKIMAENQREYSNGKYKQNRVEVNSNDIFEVLKRAFGVLKMYRDLTNHYKTYEEKLNDGCEFLTSTEQPLSGMINNYYTVALRNMNERYGYKTEDLAFIQDKRFKFVKDAYGKKKSQVNTGFFLSLQDYNGDTQKKLHLSGVGIALLICLFLDKQYINIFLSRLPIFSSYNAQSEERRIIIRSFGINSIKLPKDRIHSEKSNKSVAMDMLNEVKRCPDELFTTLSAEKQSRFRIISDDHNEVLMKRSSDRFVPLLLQYIDYGKLFDHIRFHVNMGKLRYLLKADKTCIDGQTRVRVIEQPLNGFGRLEEAETMRKQENGTFGNSGIRIRDFENMKRDDANPANYPYIVDTYTHYILENNKVEMFINDKEDSAPLLPVIEDDRYVVKTIPSCRMSTLEIPAMAFHMFLFGSKKTEKLIVDVHNRYKRLFQAMQKEEVTAENIASFGIAESDLPQKILDLISGNAHGKDVDAFIRLTVDDMLTDTERRIKRFKDDRKSIRSADNKMGKRGFKQISTGKLADFLAKDIVLFQPSVNDGENKITGLNYRIMQSAIAVYDSGDDYEAKQQFKLMFEKARLIGKGTTEPHPFLYKVFARSIPANAVEFYERYLIERKFYLTGLSNEIKKGNRVDVPFIRRDQNKWKTPAMKTLGRIYSEDLPVELPRQMFDNEIKSHLKSLPQMEGIDFNNANVTYLIAEYMKRVLDDDFQTFYQWNRNYRYMDMLKGEYDRKGSLQHCFTSVEEREGLWKERASRTERYRKQASNKIRSNRQMRNASSEEIETILDKRLSNSRNEYQKSEKVIRRYRVQDALLFLLAKKTLTELADFDGERFKLKEIMPDAEKGILSEIMPMSFTFEKGGKKYTITSEGMKLKNYGDFFVLASDKRIGNLLELVGSDIVSKED

SEQ ID NO: 167 - protein, 1030 aa, Artificial Sequence
  chemically synthesized
MDYKDHDGDYKDHDIDYKDDDDKGGMYRMQLLSCIALSLALVTNSLGGNIPALVENQKKYFGTYSVMAMLNAQTVLDHIQKVADIEGEQNENNENLWFHPVMSHLYNAKNGYDKQPEKTMFIIERLQSYFPFLKIMAENQREYSNGKYKQNRVEVNSNDIFEVLKRAFGVLKMYRDLTNHYKTYEEKLNDGCEFLTSTEQPLSGMINNYYTVALRNMNERYGYKTEDLAFIQDKRFKFVKDAYGKKKSQVNTGFFLSLQDYNGDTQKKLHLSGVGIALLICLFLDKQYINIFLSRLPIFSSYNAQSEERRIIIRSFGINSIKLPKDRIHSEKSNKSVAMDMLNEVKRCPDELFTTLSAEKQSRFRIISDDHNEVLMKRSSDRFVPLLLQYIDYGKLFDHIRFHVNMGKLRYLLKADKTCIDGQTRVRVIEQPLNGFGRLEEAETMRKQENGTFGNSGIRIRDFENMKRDDANPANYPYIVDTYTHYILENNKVEMFINDKEDSAPLLPVIEDDRYVVKTIPSCRMSTLEIPAMAFHMFLFGSKKTEKLIVDVHNRYKRLFQAMQKEEVTAENIASFGIAESDLPQKILDLISGNAHGKDVDAFIRLTVDDMLTDTERRIKRFKDDRKSIRSADNKMGKRGFKQISTGKLADFLAKDIVLFQPSVNDGENKITGLNYRIMQSAIAVYDSGDDYEAKQQFKLMFEKARLIGKGTTEPHPFLYKVFARSIPANAVEFYERYLIERKFYLTGLSNEIKKGNRVDVPFIRRDQNKWKTPAMKTLGRIYSEDLPVELPRQMFDNEIKSHLKSLPQMEGIDFNNANVTYLIAEYMKRVLDDDFQTFYQWNRNYRYMDMLKGEYDRKGSLQHCFTSVEEREGLWKERASRTERYRKQASNKIRSNRQMRNASSEEIETILDKRLSNSRNEYQKSEKVIRRYRVQDALLFLLAKKTLTELADFDGERFKLKEIMPDAEKGILSEIMPMSFTFEKGGKKYTITSEGMKLKNYGDFFVLASDKRIGNLLELVGSDIVSKED

SEQ ID NO: 168 - protein, 1052 aa, Artificial Sequence
  chemically synthesized
MDYKDHDGDYKDHDIDYKDDDDKGGMGCCFSKTAAKGEAAAERPGEAAVASSPSKANGQENGHVKVGSGGNIPALVENQKKYFGTYSVMAMLNAQTVLDHIQKVADIEGEQNENNENLWFHPVMSHLYNAKNGYDKQPEKTMFIIERLQSYFPFLKIMAENQREYSNGKYKQNRVEVNSNDIFEVLKRAFGVLKMYRDLTNHYKTYEEKLNDGCEFLTSTEQPLSGMINNYYTVALRNMNERYGYKTEDLAFIQDKRFKFVKDAYGKKKSQVNTGFFLSLQDYNGDTQKKLHLSGVGIALLICLFLDKQYINIFLSRLPIFSSYNAQSEERRIIIRSFGINSIKLPKDRIHSEKSNKSVAMDMLNEVKRCPDELFTTLSAEKQSRFRIISDDHNEVLMKRSSDRFVPLLLQYIDYGKLFDHIRFHVNMGKLRYLLKADKTCIDGQTRVRVIEQPLNGFGRLEEAETMRKQENGTFGNSGIRIRDFENMKRDDANPANYPYIVDTYTHYILENNKVEMFINDKEDSAPLLPVIEDDRYVVKTIPSCRMSTLEIPAMAFHMFLFGSKKTEKLIVDVHNRYKRLFQAMQKEEVTAENIASFGIAESDLPQKILDLISGNAHGKDVDAFIRLTVDDMLTDTERRIKRFKDDRKSIRSADNKMGKRGFKQISTGKLADFLAKDIVLFQPSVNDGENKITGLNYRIMQSAIAVYDSGDDYEAKQQFKLMFEKARLIGKGTTEPHPFLYKVFARSIPANAVEFYERYLIERKFYLTGLSNEIKKGNRVDVPFIRRDQNKWKTPAMKTLGRIYSEDLPVELPRQMFDNEIKSHLKSLPQMEGIDFNNANVTYLIAEYMKRVLDDDFQTFYQWNRNYRYMDMLKGEYDRKGSLQHCFTSVEEREGLWKERASRTERYRKQASNKIRSNRQMRNASSEEIETILDKRLSNSRNEYQKSEKVIRRYRVQDALLFLLAKKTLTELADFDGERFKLKEIMPDAEKGILSEIMPMSFTFEKGGKKYTITSEGMKLKNYGDFFVLASDKRIGNLLELVGSDIVSKED

SEQ ID NO: 169 - protein, 1026 aa, Artificial Sequence
  chemically synthesized
MDYKDHDGDYKDHDIDYKDDDDKGGMLLPVPLLLGLLGAAADGGNIPALVENQKKYFGTYSVMAMLNAQTVLDHIQKVADIEGEQNENNENLWFHPVMSHLYNAKNGYDKQPEKTMFIIERLQSYFPFLKIMAENQREYSNGKYKQNRVEVNSNDIFEVLKRAFGVLKMYRDLTNHYKTYEEKLNDGCEFLTSTEQPLSGMINNYYTVALRNMNERYGYKTEDLAFIQDKRFKFVKDAYGKKKSQVNTGFFLSLQDYNGDTQKKLHLSGVGIALLICLFLDKQYINIFLSRLPIFSSYNAQSEERRIIIRSFGINSIKLPKDRIHSEKSNKSVAMDMLNEVKRCPDELFTTLSAEKQSRFRIISDDHNEVLMKRSSDRFVPLLLQYIDYGKLFDHIRFHVNMGKLRYLLKADKTCIDGQTRVRVIEQPLNGFGRLEEAETMRKQENGTFGNSGIRIRDFENMKRDDANPANYPYIVDTYTHYILENNKVEMFINDKEDSAPLLPVIEDDRYVVKTIPSCRMSTLEIPAMAFHMFLFGSKKTEKLIVDVHNRYKRLFQAMQKEEVTAENIASFGIAESDLPQKILDLISGNAHGKDVDAFIRLTVDDMLTDTERRIKRFKDDRKSIRSADNKMGKRGFKQISTGKLADFLAKDIVLFQPSVNDGENKITGLNYRIMQSAIAVYDSGDDYEAKQQFKLMFEKARLIGKGTTEPHPFLYKVFARSIPANAVEFYERYLIERKFYLTGLSNEIKKGNRVDVPFIRRDQNKWKTPAMKTLGRIYSEDLPVELPRQMFDNEIKSHLKSLPQMEGIDFNNANVTYLIAEYMKRVLDDDFQTFYQWNRNYRYMDMLKGEYDRKGSLQHCFTSVEEREGLWKERASRTERYRKQASNKIRSNRQMRNASSEEIETILDKRLSNSRNEYQKSEKVIRRYRVQDALLFLLAKKTLTELADFDGERFKLKEIMPDAEKGILSEIMPMSFTFEKGGKKYTITSEGMKLKNYGDFFVLASDKRIGNLLELVGSDIVSKED

SEQ ID NO: 170 - protein, 1018 aa, Artificial Sequence
  chemically synthesized
MDYKDHDGDYKDHDIDYKDDDDKGGGITLGKDELGGNIPALVENQKKYFGTYSVMAMLNAQTVLDHIQKVADIEGEQNENNENLWFHPVMSHLYNAKNGYDKQPEKTMFIIERLQSYFPFLKIMAENQREYSNGKYKQNRVEVNSNDIFEVLKRAFGVLKMYRDLTNHYKTYEEKLNDGCEFLTSTEQPLSGMINNYYTVALRNMNERYGYKTEDLAFIQDKRFKFVKDAYGKKKSQVNTGFFLSLQDYNGDTQKKLHLSGVGIALLICLFLDKQYINIFLSRLPIFSSYNAQSEERRIIIRSFGINSIKLPKDRIHSEKSNKSVAMDMLNEVKRCPDELFTTLSAEKQSRFRIISDDHNEVLMKRSSDRFVPLLLQYIDYGKLFDHIRFHVNMGKLRYLLKADKTCIDGQTRVRVIEQPLNGFGRLEEAETMRKQENGTFGNSGIRIRDFENMKRDDANPANYPYIVDTYTHYILENNKVEMFINDKEDSAPLLPVIEDDRYVVKTIPSCRMSTLEIPAMAFHMFLFGSKKTEKLIVDVHNRYKRLFQAMQKEEVTAENIASFGIAESDLPQKILDLISGNAHGKDVDAFIRLTVDDMLTDTERRIKRFKDDRKSIRSADNKMGKRGFKQISTGKLADFLAKDIVLFQPSVNDGENKITGLNYRIMQSAIAVYDSGDDYEAKQQFKLMFEKARLIGKGTTEPHPFLYKVFARSIPANAVEFYERYLIERKFYLTGLSNEIKKGNRVDVPFIRRDQNKWKTPAMKTLGRIYSEDLPVELPRQMFDNEIKSHLKSLPQMEGIDFNNANVTYLIAEYMKRVLDDDFQTFYQWNRNYRYMDMLKGEYDRKGSLQHCFTSVEEREGLWKERASRTERYRKQASNKIRSNRQMRNASSEEIETILDKRLSNSRNEYQKSEKVIRRYRVQDALLFLLAKKTLTELADFDGERFKLKEIMPDAEKGILSEIMPMSFTFEKGGKKYTITSEGMKLKNYGDFFVLASDKRIGNLLELVGSDIVSKED

SEQ ID NO: 171 - protein, 1012 aa, Artificial Sequence
  chemically synthesized
MDYKDHDGDYKDHDIDYKDDDDKGGSKLGGNIPALVENQKKYFGTYSVMAMLNAQTVLDHIQKVADIEGEQNENNENLWFHPVMSHLYNAKNGYDKQPEKTMFIIERLQSYFPFLKIMAENQREYSNGKYKQNRVEVNSNDIFEVLKRAFGVLKMYRDLTNHYKTYEEKLNDGCEFLTSTEQPLSGMINNYYTVALRNMNERYGYKTEDLAFIQDKRFKFVKDAYGKKKSQVNTGFFLSLQDYNGDTQKKLHLSGVGIALLICLFLDKQYINIFLSRLPIFSSYNAQSEERRIIIRSFGINSIKLPKDRIHSEKSNKSVAMDMLNEVKRCPDELFTTLSAEKQSRFRIISDDHNEVLMKRSSDRFVPLLLQYIDYGKLFDHIRFHVNMGKLRYLLKADKTCIDGQTRVRVIEQPLNGFGRLEEAETMRKQENGTFGNSGIRIRDFENMKRDDANPANYPYIVDTYTHYILENNKVEMFINDKEDSAPLLPVIEDDRYVVKTIPSCRMSTLEIPAMAFHMFLFGSKKTEKLIVDVHNRYKRLFQAMQKEEVTAENIASFGIAESDLPQKILDLISGNAHGKDVDAFIRLTVDDMLTDTERRIKRFKDDRKSIRSADNKMGKRGFKQISTGKLADFLAKDIVLFQPSVNDGENKITGLNYRIMQSAIAVYDSGDDYEAKQQFKLMFEKARLIGKGTTEPHPFLYKVFARSIPANAVEFYERYLIERKFYLTGLSNEIKKGNRVDVPFIRRDQNKWKTPAMKTLGRIYSEDLPVELPRQMFDNEIKSHLKSLPQMEGIDFNNANVTYLIAEYMKRVLDDDFQTFYQWNRNYRYMDMLKGEYDRKGSLQHCFTSVEEREGLWKERASRTERYRKQASNKIRSNRQMRNASSEEIETILDKRLSNSRNEYQKSEKVIRRYRVQDALLFLLAKKTLTELADFDGERFKLKEIMPDAEKGILSEIMPMSFTFEKGGKKYTITSEGMKLKNYGDFFVLASDKRIGNLLELVGSDIVSKED

SEQ ID NO: 172 - protein, 1273 aa, Artificial Sequence
  chemically synthesized
MFVFLVLLPLVSSQCVNLTTRTQLPPAYTNSFTRGVYYPDKVFRSSVLHSTQDLFLPFFSNVTWFHAIHVSGTNGTKRFDNPVLPFNDGVYFASTEKSNIIRGWIFGTTLDSKTQSLLIVNNATNVVIKVCEFQFCNDPFLGVYYHKNNKSWMESEFRVYSSANNCTFEYVSQPFLMDLEGKQGNFKNLREFVFKNIDGYFKIYSKHTPINLVRDLPQGFSALEPLVDLPIGINITRFQTLLALHRSYLTPGDSSSGWTAGAAAYYVGYLQPRTFLLKYNENGTITDAVDCALDPLSETKCTLKSFTVEKGIYQTSNFRVQPTESIVRFPNITNLCPFGEVFNATRFASVYAWNRKRISNCVADYSVLYNSASFSTFKCYGVSPTKLNDLCFTNVYADSFVIRGDEVRQIAPGQTGKIADYNYKLPDDFTGCVIAWNSNNLDSKVGGNYNYLYRLFRKSNLKPFERDISTEIYQAGSTPCNGVEGFNCYFPLQSYGFQPTNGVGYQPYRVVVLSFELLHAPATVCGPKKSTNLVKNKCVNFNFNGLTGTGVLTESNKKFLPFQQFGRDIADTTDAVRDPQTLEILDITPCSFGGVSVITPGTNTSNQVAVLYQDVNCTEVPVAIHADQLTPTWRVYSTGSNVFQTRAGCLIGAEHVNNSYECDIPIGAGICASYQTQTNSPRRARSVASQSIIAYTMSLGAENSVAYSNNSIAIPTNFTISVTTEILPVSMTKTSVDCTMYICGDSTECSNLLLQYGSFCTQLNRALTGIAVEQDKNTQEVFAQVKQIYKTPPIKDFGGFNFSQILPDPSKPSKRSFIEDLLFNKVTLADAGFIKQYGDCLGDIAARDLICAQKFNGLTVLPPLLTDEMIAQYTSALLAGTITSGWTFGAGAALQIPFAMQMAYRFNGIGVTQNVLYENQKLIANQFNSAIGKIQDSLSSTASALGKLQDVVNQNAQALNTLVKQLSSNFGAISSVLNDILSRLDKVEAEVQIDRLITGRLQSLQTYVTQQLIRAAEIRASANLAATKMSECVLGQSKRVDFCGKGYHLMSFPQSAPHGVVFLHVTYVPAQEKNFTTAPAICHDGKAHFPREGVFVSNGTHWFVTQRNFYEPQIITTDNTFVSGNCDVVIGIVNNTVYDPLQPELDSFKEELDKYFKNHTSPDVDLGDISGINASVVNIQKEIDRLNEVAKNLNESLIDLQELGKYEQYIKWPWYIWLGFIAGLIAIVMVTIMLCCMTSCCSCLKGCCSCGSCCKFDEDDSEPVLKGVKLHYT

SEQ ID NO: 173 - protein, 1246 aa, Artificial Sequence
  chemically synthesized
MFVFLVLLPLVSSQCVNLTTRTQLPPAYTNSFTRGVYYPDKVFRSSVLHSTQDLFLPFFSNVTWFHAIHVSGTNGTKRFDNPVLPFNDGVYFASTEKSNIIRGWIFGTTLDSKTQSLLIVNNATNVVIKVCEFQFCNDPFLGVYYHKNNKSWMESEFRVYSSANNCTFEYVSQPFLMDLEGKQGNFKNLREFVFKNIDGYFKIYSKHTPINLVRDLPQGFSALEPLVDLPIGINITRFQTLLALHRSYLTPGDSSSGWTAGAAAYYVGYLQPRTFLLKYNENGTITDAVDCALDPLSETKCTLKSFTVEKGIYQTSNFRVQPTESIVRFPNITNLCPFGEVFNATRFASVYAWNRKRISNCVADYSVLYNSASFSTFKCYGVSPTKLNDLCFTNVYADSFVIRGDEVRQIAPGQTGKIADYNYKLPDDFTGCVIAWNSNNLDSKVGGNYNYLYRLFRKSNLKPFERDISTEIYQAGSTPCNGVEGFNCYFPLQSYGFQPTNGVGYQPYRVVVLSFELLHAPATVCGPKKSTNLVKNKCVNFNFNGLTGTGVLTESNKKFLPFQQFGRDIADTTDAVRDPQTLEILDITPCSFGGVSVITPGTNTSNQVAVLYQDVNCTEVPVAIHADQLTPTWRVYSTGSNVFQTRAGCLIGAEHVNNSYECDIPIGAGICASYQTQTNSPRRARSVASQSIIAYTMSLGAENSVAYSNNSIAIPTNFTISVTTEILPVSMTKTSVDCTMYICGDSTECSNLLLQYGSFCTQLNRALTGIAVEQDKNTQEVFAQVKQIYKTPPIKDFGGFNFSQILPDPSKPSKRSFIEDLLFNKVTLADAGFIKQYGDCLGDIAARDLICAQKFNGLTVLPPLLTDEMIAQYTSALLAGTITSGWTFGAGAALQIPFAMQMAYRFNGIGVTQNVLYENQKLIANQFNSAIGKIQDSLSSTASALGKLQDVVNQNAQALNTLVKQLSSNFGAISSVLNDILSRLDKVEAEVQIDRLITGRLQSLQTYVTQQLIRAAEIRASANLAATKMSECVLGQSKRVDFCGKGYHLMSFPQSAPHGVVFLHVTYVPAQEKNFTTAPAICHDGKAHFPREGVFVSNGTHWFVTQRNFYEPQIITTDNTFVSGNCDVVIGIVNNTVYDPLQPELDSFKEELDKYFKNHTSPDVDLGDISGINASVVNIQKEIDRLNEVAKNLNESLIDLQELGKYEQYIKWPWYIWLGFIAGLIAIVMVTIMLCCMTSCCSCLKG

SEQ ID NO: 174 - protein, 1254 aa, Artificial Sequence
  chemically synthesized
MFVFLVLLPLVSSQCVNLTTRTQLPPAYTNSFTRGVYYPDKVFRSSVLHSTQDLFLPFFSNVTWFHAIHVSGTNGTKRFDNPVLPFNDGVYFASTEKSNIIRGWIFGTTLDSKTQSLLIVNNATNVVIKVCEFQFCNDPFLGVYYHKNNKSWMESEFRVYSSANNCTFEYVSQPFLMDLEGKQGNFKNLREFVFKNIDGYFKIYSKHTPINLVRDLPQGFSALEPLVDLPIGINITRFQTLLALHRSYLTPGDSSSGWTAGAAAYYVGYLQPRTFLLKYNENGTITDAVDCALDPLSETKCTLKSFTVEKGIYQTSNFRVQPTESIVRFPNITNLCPFGEVFNATRFASVYAWNRKRISNCVADYSVLYNSASFSTFKCYGVSPTKLNDLCFTNVYADSFVIRGDEVRQIAPGQTGKIADYNYKLPDDFTGCVIAWNSNNLDSKVGGNYNYLYRLFRKSNLKPFERDISTEIYQAGSTPCNGVEGFNCYFPLQSYGFQPTNGVGYQPYRVVVLSFELLHAPATVCGPKKSTNLVKNKCVNFNFNGLTGTGVLTESNKKFLPFQQFGRDIADTTDAVRDPQTLEILDITPCSFGGVSVITPGTNTSNQVAVLYQDVNCTEVPVAIHADQLTPTWRVYSTGSNVFQTRAGCLIGAEHVNNSYECDIPIGAGICASYQTQTNSPRRARSVASQSIIAYTMSLGAENSVAYSNNSIAIPTNFTISVTTEILPVSMTKTSVDCTMYICGDSTECSNLLLQYGSFCTQLNRALTGIAVEQDKNTQEVFAQVKQIYKTPPIKDFGGFNFSQILPDPSKPSKRSFIEDLLFNKVTLADAGFIKQYGDCLGDIAARDLICAQKFNGLTVLPPLLTDEMIAQYTSALLAGTITSGWTFGAGAALQIPFAMQMAYRFNGIGVTQNVLYENQKLIANQFNSAIGKIQDSLSSTASALGKLQDVVNQNAQALNTLVKQLSSNFGAISSVLNDILSRLDKVEAEVQIDRLITGRLQSLQTYVTQQLIRAAEIRASANLAATKMSECVLGQSKRVDFCGKGYHLMSFPQSAPHGVVFLHVTYVPAQEKNFTTAPAICHDGKAHFPREGVFVSNGTHWFVTQRNFYEPQIITTDNTFVSGNCDVVIGIVNNTVYDPLQPELDSFKEELDKYFKNHTSPDVDLGDISGINASVVNIQKEIDRLNEVAKNLNESLIDLQELGKYEQYIKWPWYIWLGFIAGLIAIVMVTIMLCCMTSCCSCLKGNRVRQGYS

SEQ ID NO: 175 - protein, 1255 aa, Artificial Sequence
  chemically synthesized
MFVFLVLLPLVSSQCVNLTTRTQLPPAYTNSFTRGVYYPDKVFRSSVLHSTQDLFLPFFSNVTWFHAIHVSGTNGTKRFDNPVLPFNDGVYFASTEKSNIIRGWIFGTTLDSKTQSLLIVNNATNVVIKVCEFQFCNDPFLGVYYHKNNKSWMESEFRVYSSANNCTFEYVSQPFLMDLEGKQGNFKNLREFVFKNIDGYFKIYSKHTPINLVRDLPQGFSALEPLVDLPIGINITRFQTLLALHRSYLTPGDSSSGWTAGAAAYYVGYLQPRTFLLKYNENGTITDAVDCALDPLSETKCTLKSFTVEKGIYQTSNFRVQPTESIVRFPNITNLCPFGEVFNATRFASVYAWNRKRISNCVADYSVLYNSASFSTFKCYGVSPTKLNDLCFTNVYADSFVIRGDEVRQIAPGQTGKIADYNYKLPDDFTGCVIAWNSNNLDSKVGGNYNYLYRLFRKSNLKPFERDISTEIYQAGSTPCNGVEGFNCYFPLQSYGFQPTNGVGYQPYRVVVLSFELLHAPATVCGPKKSTNLVKNKCVNFNFNGLTGTGVLTESNKKFLPFQQFGRDIADTTDAVRDPQTLEILDITPCSFGGVSVITPGTNTSNQVAVLYQDVNCTEVPVAIHADQLTPTWRVYSTGSNVFQTRAGCLIGAEHVNNSYECDIPIGAGICASYQTQTNSPRRARSVASQSIIAYTMSLGAENSVAYSNNSIAIPTNFTISVTTEILPVSMTKTSVDCTMYICGDSTECSNLLLQYGSFCTQLNRALTGIAVEQDKNTQEVFAQVKQIYKTPPIKDFGGFNFSQILPDPSKPSKRSFIEDLLFNKVTLADAGFIKQYGDCLGDIAARDLICAQKFNGLTVLPPLLTDEMIAQYTSALLAGTITSGWTFGAGAALQIPFAMQMAYRFNGIGVTQNVLYENQKLIANQFNSAIGKIQDSLSSTASALGKLQDVVNQNAQALNTLVKQLSSNFGAISSVLNDILSRLDKVEAEVQIDRLITGRLQSLQTYVTQQLIRAAEIRASANLAATKMSECVLGQSKRVDFCGKGYHLMSFPQSAPHGVVFLHVTYVPAQEKNFTTAPAICHDGKAHFPREGVFVSNGTHWFVTQRNFYEPQIITTDNTFVSGNCDVVIGIVNNTVYDPLQPELDSFKEELDKYFKNHTSPDVDLGDISGINASVVNIQKEIDRLNEVAKNLNESLIDLQELGKYEQYIKWPWYIWLGFIAGLIAIVMVTIMLKLKHTKKRQIYTDIEMNRLGK

SEQ ID NO: 176 - protein, 1385 aa, Artificial Sequence
  chemically synthesized
MFVFLVLLPLVSSQCVNLTTRTQLPPAYTNSFTRGVYYPDKVFRSSVLHSTQDLFLPFFSNVTWFHAIHVSGTNGTKRFDNPVLPFNDGVYFASTEKSNIIRGWIFGTTLDSKTQSLLIVNNATNVVIKVCEFQFCNDPFLGVYYHKNNKSWMESEFRVYSSANNCTFEYVSQPFLMDLEGKQGNFKNLREFVFKNIDGYFKIYSKHTPINLVRDLPQGFSALEPLVDLPIGINITRFQTLLALHRSYLTPGDSSSGWTAGAAAYYVGYLQPRTFLLKYNENGTITDAVDCALDPLSETKCTLKSFTVEKGIYQTSNFRVQPTESIVRFPNITNLCPFGEVFNATRFASVYAWNRKRISNCVADYSVLYNSASFSTFKCYGVSPTKLNDLCFTNVYADSFVIRGDEVRQIAPGQTGKIADYNYKLPDDFTGCVIAWNSNNLDSKVGGNYNYLYRLFRKSNLKPFERDISTEIYQAGSTPCNGVEGFNCYFPLQSYGFQPTNGVGYQPYRVVVLSFELLHAPATVCGPKKSTNLVKNKCVNFNFNGLTGTGVLTESNKKFLPFQQFGRDIADTTDAVRDPQTLEILDITPCSFGGVSVITPGTNTSNQVAVLYQDVNCTEVPVAIHADQLTPTWRVYSTGSNVFQTRAGCLIGAEHVNNSYECDIPIGAGICASYQTQTNSPRRARSVASQSIIAYTMSLGAENSVAYSNNSIAIPTNFTISVTTEILPVSMTKTSVDCTMYICGDSTECSNLLLQYGSFCTQLNRALTGIAVEQDKNTQEVFAQVKQIYKTPPIKDFGGFNFSQILPDPSKPSKRSFIEDLLFNKVTLADAGFIKQYGDCLGDIAARDLICAQKFNGLTVLPPLLTDEMIAQYTSALLAGTITSGWTFGAGAALQIPFAMQMAYRFNGIGVTQNVLYENQKLIANQFNSAIGKIQDSLSSTASALGKLQDVVNQNAQALNTLVKQLSSNFGAISSVLNDILSRLDKVEAEVQIDRLITGRLQSLQTYVTQQLIRAAEIRASANLAATKMSECVLGQSKRVDFCGKGYHLMSFPQSAPHGVVFLHVTYVPAQEKNFTTAPAICHDGKAHFPREGVFVSNGTHWFVTQRNFYEPQIITTDNTFVSGNCDVVIGIVNNTVYDPLQPELDSFKEELDKYFKNHTSPDVDLGDISGINASVVNIQKEIDRLNEVAKNLNESLIDLQELGKYEQYIKWPWYIWLGFIAGLIAIVMVTIMLNRVRQGYSPLSFQTLTPVPRGPDRPEGTEEGGGEQDRNRSIRLVSGFLALAWDDLRSLCLFSYHRLRDLILIATRIVELLGHRGWEAIKYLWNLLLYWGRELKISAINLIDTIAIVVAGWTDRVIEIGQGIGRAILHIPRRIRQGLERSLL

SEQ ID NO: 177 - protein, 1392 aa, Artificial Sequence
  chemically synthesized
MFVFLVLLPLVSSQCVNLTTRTQLPPAYTNSFTRGVYYPDKVFRSSVLHSTQDLFLPFFSNVTWFHAIHVSGTNGTKRFDNPVLPFNDGVYFASTEKSNIIRGWIFGTTLDSKTQSLLIVNNATNVVIKVCEFQFCNDPFLGVYYHKNNKSWMESEFRVYSSANNCTFEYVSQPFLMDLEGKQGNFKNLREFVFKNIDGYFKIYSKHTPINLVRDLPQGFSALEPLVDLPIGINITRFQTLLALHRSYLTPGDSSSGWTAGAAAYYVGYLQPRTFLLKYNENGTITDAVDCALDPLSETKCTLKSFTVEKGIYQTSNFRVQPTESIVRFPNITNLCPFGEVFNATRFASVYAWNRKRISNCVADYSVLYNSASFSTFKCYGVSPTKLNDLCFTNVYADSFVIRGDEVRQIAPGQTGKIADYNYKLPDDFTGCVIAWNSNNLDSKVGGNYNYLYRLFRKSNLKPFERDISTEIYQAGSTPCNGVEGFNCYFPLQSYGFQPTNGVGYQPYRVVVLSFELLHAPATVCGPKKSTNLVKNKCVNFNFNGLTGTGVLTESNKKFLPFQQFGRDIADTTDAVRDPQTLEILDITPCSFGGVSVITPGTNTSNQVAVLYQDVNCTEVPVAIHADQLTPTWRVYSTGSNVFQTRAGCLIGAEHVNNSYECDIPIGAGICASYQTQTNSPRRARSVASQSIIAYTMSLGAENSVAYSNNSIAIPTNFTISVTTEILPVSMTKTSVDCTMYICGDSTECSNLLLQYGSFCTQLNRALTGIAVEQDKNTQEVFAQVKQIYKTPPIKDFGGFNFSQILPDPSKPSKRSFIEDLLFNKVTLADAGFIKQYGDCLGDIAARDLICAQKFNGLTVLPPLLTDEMIAQYTSALLAGTITSGWTFGAGAALQIPFAMQMAYRFNGIGVTQNVLYENQKLIANQFNSAIGKIQDSLSSTASALGKLQDVVNQNAQALNTLVKQLSSNFGAISSVLNDILSRLDKVEAEVQIDRLITGRLQSLQTYVTQQLIRAAEIRASANLAATKMSECVLGQSKRVDFCGKGYHLMSFPQSAPHGVVFLHVTYVPAQEKNFTTAPAICHDGKAHFPREGVFVSNGTHWFVTQRNFYEPQIITTDNTFVSGNCDVVIGIVNNTVYDPLQPELDSFKEELDKYFKNHTSPDVDLGDISGINASVVNIQKEIDRLNEVAKNLNESLIDLQELGKYEQYIKWPWLWYIKIFIMIVGGLIGLRIVFAVLSLVNRVRQGYSPLSFQTLTPVPRGPDRPEGTEEGGGEQDRNRSIRLVSGFLALAWDDLRSLCLFSYHRLRDLILIATRIVELLGHRGWEAIKYLWNLLLYWGRELKISAINLIDTIAIVVAGWTDRVIEIGQGIGRAILHIPRRIRQGLERSLL

SEQ ID NO: 178 - protein, 1257 aa, Artificial Sequence
  chemically synthesized
MFVFLVLLPLVSSQCVNLTTRTQLPPAYTNSFTRGVYYPDKVFRSSVLHSTQDLFLPFFSNVTWFHAIHVSGTNGTKRFDNPVLPFNDGVYFASTEKSNIIRGWIFGTTLDSKTQSLLIVNNATNVVIKVCEFQFCNDPFLGVYYHKNNKSWMESEFRVYSSANNCTFEYVSQPFLMDLEGKQGNFKNLREFVFKNIDGYFKIYSKHTPINLVRDLPQGFSALEPLVDLPIGINITRFQTLLALHRSYLTPGDSSSGWTAGAAAYYVGYLQPRTFLLKYNENGTITDAVDCALDPLSETKCTLKSFTVEKGIYQTSNFRVQPTESIVRFPNITNLCPFGEVFNATRFASVYAWNRKRISNCVADYSVLYNSASFSTFKCYGVSPTKLNDLCFTNVYADSFVIRGDEVRQIAPGQTGKIADYNYKLPDDFTGCVIAWNSNNLDSKVGGNYNYLYRLFRKSNLKPFERDISTEIYQAGSTPCNGVEGFNCYFPLQSYGFQPTNGVGYQPYRVVVLSFELLHAPATVCGPKKSTNLVKNKCVNFNFNGLTGTGVLTESNKKFLPFQQFGRDIADTTDAVRDPQTLEILDITPCSFGGVSVITPGTNTSNQVAVLYQDVNCTEVPVAIHADQLTPTWRVYSTGSNVFQTRAGCLIGAEHVNNSYECDIPIGAGICASYQTQTNSPRRARSVASQSIIAYTMSLGAENSVAYSNNSIAIPTNFTISVTTEILPVSMTKTSVDCTMYICGDSTECSNLLLQYGSFCTQLNRALTGIAVEQDKNTQEVFAQVKQIYKTPPIKDFGGFNFSQILPDPSKPSKRSFIEDLLFNKVTLADAGFIKQYGDCLGDIAARDLICAQKFNGLTVLPPLLTDEMIAQYTSALLAGTITSGWTFGAGAALQIPFAMQMAYRFNGIGVTQNVLYENQKLIANQFNSAIGKIQDSLSSTASALGKLQDVVNQNAQALNTLVKQLSSNFGAISSVLNDILSRLDKVEAEVQIDRLITGRLQSLQTYVTQQLIRAAEIRASANLAATKMSECVLGQSKRVDFCGKGYHLMSFPQSAPHGVVFLHVTYVPAQEKNFTTAPAICHDGKAHFPREGVFVSNGTHWFVTQRNFYEPQIITTDNTFVSGNCDVVIGIVNNTVYDPLQPELDSFKEELDKYFKNHTSPDVDLGDISGINASVVNIQKEIDRLNEVAKNLNESLIDLQELGKYEQYIKWPFFFIIGLIIGLFLVLRVGIHLCIKLKHTKKRQIYTDIEMNRLGK

SEQ ID NO: 179 - protein, 1255 aa, Artificial Sequence
  chemically synthesized
MFIFLLFLTLTSGSDLDRCTTFDDVQAPNYTQHTSSMRGVYYPDEIFRSDTLYLTQDLFLPFYSNVTGFHTINHTFDNPVIPFKDGIYFAATEKSNVVRGWVFGSTMNNKSQSVIIINNSTNVVIRACNFELCDNPFFAVSKPMGTQTHTMIFDNAFNCTFEYISDAFSLDVSEKSGNFKHLREFVFKNKDGFLYVYKGYQPIDVVRDLPSGFNTLKPIFKLPLGINITNFRAILTAFSPAQDTWGTSAAAYFVGYLKPTTFMLKYDENGTITDAVDCSQNPLAELKCSVKSFEIDKGIYQTSNFRVVPSGDVVRFPNITNLCPFGEVFNATKFPSVYAWERKKISNCVADYSVLYNSTFFSTFKCYGVSATKLNDLCFSNVYADSFVVKGDDVRQIAPGQTGVIADYNYKLPDDFMGCVLAWNTRNIDATSTGNYNYKYRYLRHGKLRPFERDISNVPFSPDGKPCTPPALNCYWPLNDYGFYTTTGIGYQPYRVVVLSFELLNAPATVCGPKLSTDLIKNQCVNFNFNGLTGTGVLTPSSKRFQPFQQFGRDVSDFTDSVRDPKTSEILDISPCSFGGVSVITPGTNASSEVAVLYQDVNCTDVSTAIHADQLTPAWRIYSTGNNVFQTQAGCLIGAEHVDTSYECDIPIGAGICASYHTVSLLRSTSQKSIVAYTMSLGADSSIAYSNNTIAIPTNFSISITTEVMPVSMAKTSVDCNMYICGDSTECANLLLQYGSFCTQLNRALSGIAAEQDRNTREVFAQVKQMYKTPTLKYFGGFNFSQILPDPLKPTKRSFIEDLLFNKVTLADAGFMKQYGECLGDINARDLICAQKFNGLTVLPPLLTDDMIAAYTAALVSGTATAGWTFGAGAALQIPFAMQMAYRFNGIGVTQNVLYENQKQIANQFNKAISQIQESLTTTSTALGKLQDVVNQNAQALNTLVKQLSSNFGAISSVLNDILSRLDKVEAEVQIDRLITGRLQSLQTYVTQQLIRAAEIRASANLAATKMSECVLGQSKRVDFCGKGYHLMSFPQAAPHGVVFLHVTYVPSQERNFTTAPAICHEGKAYFPREGVFVFNGTSWFITQRNFFSPQIITTDNTFVSGNCDVVIGIINNTVYDPLQPELDSFKEELDKYFKNHTSPDVDLGDISGINASVVNIQKEIDRLNEVAKNLNESLIDLQELGKYEQYIKWPWYVWLGFIAGLIAIVMVTILLCCMTSCCSCLKGACSCGSCCKFDEDDSEPVLKGVKLHYT

SEQ ID NO: 180 - protein, 1241 aa, Artificial Sequence
  chemically synthesized
MPMGSLQPLATLYLLGMLVASVLASGSDLDRCTTFDDVQAPNYTQHTSSMRGVYYPDEIFRSDTLYLTQDLFLPFYSNVTGFHTINHTFDNPVIPFKDGIYFAATEKSNVVRGWVFGSTMNNKSQSVIIINNSTNVVIRACNFELCDNPFFAVSKPMGTQTHTMIFDNAFNCTFEYISDAFSLDVSEKSGNFKHLREFVFKNKDGFLYVYKGYQPIDVVRDLPSGFNTLKPIFKLPLGINITNFRAILTAFSPAQDTWGTSAAAYFVGYLKPTTFMLKYDENGTITDAVDCSQNPLAELKCSVKSFEIDKGIYQTSNFRVVPSGDVVRFPNITNLCPFGEVFNATKFPSVYAWERKKISNCVADYSVLYNSTFFSTFKCYGVSATKLNDLCFSNVYADSFVVKGDDVRQIAPGQTGVIADYNYKLPDDFMGCVLAWNTRNIDATSTGNYNYKYRYLRHGKLRPFERDISNVPFSPDGKPCTPPALNCYWPLNDYGFYTTTGIGYQPYRVVVLSFELLNAPATVCGPKLSTDLIKNQCVNFNFNGLTGTGVLTPSSKRFQPFQQFGRDVSDFTDSVRDPKTSEILDISPCSFGGVSVITPGTNASSEVAVLYQDVNCTDVSTAIHADQLTPAWRIYSTGNNVFQTQAGCLIGAEHVDTSYECDIPIGAGICASYHTVSLLRSTSQKSIVAYTMSLGADSSIAYSNNTIAIPTNFSISITTEVMPVSMAKTSVDCNMYICGDSTECANLLLQYGSFCTQLNRALSGIAAEQDRNTREVFAQVKQMYKTPTLKYFGGFNFSQILPDPLKPTKRSFIEDLLFNKVTLADAGFMKQYGECLGDINARDLICAQKFNGLTVLPPLLTDDMIAAYTAALVSGTATAGWTFGAGAALQIPFAMQMAYRFNGIGVTQNVLYENQKQIANQFNKAISQIQESLTTTSTALGKLQDVVNQNAQALNTLVKQLSSNFGAISSVLNDILSRLDKVEAEVQIDRLITGRLQSLQTYVTQQLIRAAEIRASANLAATKMSECVLGQSKRVDFCGKGYHLMSFPQAAPHGVVFLHVTYVPSQERNFTTAPAICHEGKAYFPREGVFVFNGTSWFITQRNFFSPQIITTDNTFVSGNCDVVIGIINNTVYDPLQPELDSFKEELDKYFKNHTSPDVDLGDISGINASVVNIQKEIDRLNEVAKNLNESLIDLQELGKYEQYIKWPWYVWLGFIAGLIAIVMVTILLCCMTSCCSCLKG

SEQ ID NO: 181 - protein, 1252 aa, Artificial Sequence
  chemically synthesized
MPMGSLQPLATLYLLGMLVASVLASGSDLDRCTTFDDVQAPNYTQHTSSMRGVYYPDEIFRSDTLYLTQDLFLPFYSNVTGFHTINHTFDNPVIPFKDGIYFAATEKSNVVRGWVFGSTMNNKSQSVIIINNSTNVVIRACNFELCDNPFFAVSKPMGTQTHTMIFDNAFNCTFEYISDAFSLDVSEKSGNFKHLREFVFKNKDGFLYVYKGYQPIDVVRDLPSGFNTLKPIFKLPLGINITNFRAILTAFSPAQDTWGTSAAAYFVGYLKPTTFMLKYDENGTITDAVDCSQNPLAELKCSVKSFEIDKGIYQTSNFRVVPSGDVVRFPNITNLCPFGEVFNATKFPSVYAWERKKISNCVADYSVLYNSTFFSTFKCYGVSATKLNDLCFSNVYADSFVVKGDDVRQIAPGQTGVIADYNYKLPDDFMGCVLAWNTRNIDATSTGNYNYKYRYLRHGKLRPFERDISNVPFSPDGKPCTPPALNCYWPLNDYGFYTTTGIGYQPYRVVVLSFELLNAPATVCGPKLSTDLIKNQCVNFNFNGLTGTGVLTPSSKRFQPFQQFGRDVSDFTDSVRDPKTSEILDISPCSFGGVSVITPGTNASSEVAVLYQDVNCTDVSTAIHADQLTPAWRIYSTGNNVFQTQAGCLIGAEHVDTSYECDIPIGAGICASYHTVSLLRSTSQKSIVAYTMSLGADSSIAYSNNTIAIPTNFSISITTEVMPVSMAKTSVDCNMYICGDSTECANLLLQYGSFCTQLNRALSGIAAEQDRNTREVFAQVKQMYKTPTLKYFGGFNFSQILPDPLKPTKRSFIEDLLFNKVTLADAGFMKQYGECLGDINARDLICAQKFNGLTVLPPLLTDDMIAAYTAALVSGTATAGWTFGAGAALQIPFAMQMAYRFNGIGVTQNVLYENQKQIANQFNKAISQIQESLTTTSTALGKLQDVVNQNAQALNTLVKQLSSNFGAISSVLNDILSRLDKVEAEVQIDRLITGRLQSLQTYVTQQLIRAAEIRASANLAATKMSECVLGQSKRVDFCGKGYHLMSFPQAAPHGVVFLHVTYVPSQERNFTTAPAICHEGKAYFPREGVFVFNGTSWFITQRNFFSPQIITTDNTFVSGNCDVVIGIINNTVYDPLQPELDSFKEELDKYFKNHTSPDVDLGDISGINASVVNIQKEIDRLNEVAKNLNESLIDLQELGKYEQYIKWPFFFIIGLIIGLFLVLRVGIHLCIKLKHTKKRQIYTDIEMNRLGK

SEQ ID NO: 182 - protein, 1259 aa, Artificial Sequence
  chemically synthesized
MPMGSLQPLATLYLLGMLVASVLASSQCVNLTTRTQLPPAYTNSFTRGVYYPDKVFRSSVLHSTQDLFLPFFSNVTWFHAIHVSGTNGTKRFDNPVLPFNDGVYFASTEKSNIIRGWIFGTTLDSKTQSLLIVNNATNVVIKVCEFQFCNDPFLGVYYHKNNKSWMESEFRVYSSANNCTFEYVSQPFLMDLEGKQGNFKNLREFVFKNIDGYFKIYSKHTPINLVRDLPQGFSALEPLVDLPIGINITRFQTLLALHRSYLTPGDSSSGWTAGAAAYYVGYLQPRTFLLKYNENGTITDAVDCALDPLSETKCTLKSFTVEKGIYQTSNFRVQPTESIVRFPNITNLCPFGEVFNATRFASVYAWNRKRISNCVADYSVLYNSASFSTFKCYGVSPTKLNDLCFTNVYADSFVIRGDEVRQIAPGQTGKIADYNYKLPDDFTGCVIAWNSNNLDSKVGGNYNYLYRLFRKSNLKPFERDISTEIYQAGSTPCNGVEGFNCYFPLQSYGFQPTNGVGYQPYRVVVLSFELLHAPATVCGPKKSTNLVKNKCVNFNFNGLTGTGVLTESNKKFLPFQQFGRDIADTTDAVRDPQTLEILDITPCSFGGVSVITPGTNTSNQVAVLYQDVNCTEVPVAIHADQLTPTWRVYSTGSNVFQTRAGCLIGAEHVNNSYECDIPIGAGICASYQTQTNSPRRARSVASQSIIAYTMSLGAENSVAYSNNSIAIPTNFTISVTTEILPVSMTKTSVDCTMYICGDSTECSNLLLQYGSFCTQLNRALTGIAVEQDKNTQEVFAQVKQIYKTPPIKDFGGFNFSQILPDPSKPSKRSFIEDLLFNKVTLADAGFIKQYGDCLGDIAARDLICAQKFNGLTVLPPLLTDEMIAQYTSALLAGTITSGWTFGAGAALQIPFAMQMAYRFNGIGVTQNVLYENQKLIANQFNSAIGKIQDSLSSTASALGKLQDVVNQNAQALNTLVKQLSSNFGAISSVLNDILSRLDKVEAEVQIDRLITGRLQSLQTYVTQQLIRAAEIRASANLAATKMSECVLGQSKRVDFCGKGYHLMSFPQSAPHGVVFLHVTYVPAQEKNFTTAPAICHDGKAHFPREGVFVSNGTHWFVTQRNFYEPQIITTDNTFVSGNCDVVIGIVNNTVYDPLQPELDSFKEELDKYFKNHTSPDVDLGDISGINASVVNIQKEIDRLNEVAKNLNESLIDLQELGKYEQYIKWPWYIWLGFIAGLIAIVMVTIMLCCMTSCCSCLKG

SEQ ID NO: 183 - protein, 1270 aa, Artificial Sequence
  chemically synthesized
MPMGSLQPLATLYLLGMLVASVLASSQCVNLTTRTQLPPAYTNSFTRGVYYPDKVFRSSVLHSTQDLFLPFFSNVTWFHAIHVSGTNGTKRFDNPVLPFNDGVYFASTEKSNIIRGWIFGTTLDSKTQSLLIVNNATNVVIKVCEFQFCNDPFLGVYYHKNNKSWMESEFRVYSSANNCTFEYVSQPFLMDLEGKQGNFKNLREFVFKNIDGYFKIYSKHTPINLVRDLPQGFSALEPLVDLPIGINITRFQTLLALHRSYLTPGDSSSGWTAGAAAYYVGYLQPRTFLLKYNENGTITDAVDCALDPLSETKCTLKSFTVEKGIYQTSNFRVQPTESIVRFPNITNLCPFGEVFNATRFASVYAWNRKRISNCVADYSVLYNSASFSTFKCYGVSPTKLNDLCFTNVYADSFVIRGDEVRQIAPGQTGKIADYNYKLPDDFTGCVIAWNSNNLDSKVGGNYNYLYRLFRKSNLKPFERDISTEIYQAGSTPCNGVEGFNCYFPLQSYGFQPTNGVGYQPYRVVVLSFELLHAPATVCGPKKSTNLVKNKCVNFNFNGLTGTGVLTESNKKFLPFQQFGRDIADTTDAVRDPQTLEILDITPCSFGGVSVITPGTNTSNQVAVLYQDVNCTEVPVAIHADQLTPTWRVYSTGSNVFQTRAGCLIGAEHVNNSYECDIPIGAGICASYQTQTNSPRRARSVASQSIIAYTMSLGAENSVAYSNNSIAIPTNFTISVTTEILPVSMTKTSVDCTMYICGDSTECSNLLLQYGSFCTQLNRALTGIAVEQDKNTQEVFAQVKQIYKTPPIKDFGGFNFSQILPDPSKPSKRSFIEDLLFNKVTLADAGFIKQYGDCLGDIAARDLICAQKFNGLTVLPPLLTDEMIAQYTSALLAGTITSGWTFGAGAALQIPFAMQMAYRFNGIGVTQNVLYENQKLIANQFNSAIGKIQDSLSSTASALGKLQDVVNQNAQALNTLVKQLSSNFGAISSVLNDILSRLDKVEAEVQIDRLITGRLQSLQTYVTQQLIRAAEIRASANLAATKMSECVLGQSKRVDFCGKGYHLMSFPQSAPHGVVFLHVTYVPAQEKNFTTAPAICHDGKAHFPREGVFVSNGTHWFVTQRNFYEPQIITTDNTFVSGNCDVVIGIVNNTVYDPLQPELDSFKEELDKYFKNHTSPDVDLGDISGINASVVNIQKEIDRLNEVAKNLNESLIDLQELGKYEQYIKWPFFFIIGLIIGLFLVLRVGIHLCIKLKHTKKRQIYTDIEMNRLGK

SEQ ID NO: 184 - protein, 511 aa, Artificial Sequence
  chemically synthesized
MKCLLYLAFLFIGVNCKFTIVFPHNQKGNWKNVPSNYHYCPSSSDLNWHNDLIGTALQVKMPKSHKAIQADGWMCHASKWVTTCDFRWYGPKYITHSIRSFTPSVEQCKESIEQTKQGTWLNPGFPPQSCGYATVTDAEAVIVQVTPHHVLVDEYTGEWVDSQFINGKCSNYICPTVHNSTTWHSDYKVKGLCDSNLISMDITFFSEDGELSSLGKEGTGFRSNYFAYETGGKACKMQYCKHWGVRLPSGVWFEMADKDLFAAARFPECPEGSSISAPSQTSVDVSLIQDVERILDYSLCQETWSKIRAGLPISPVDLSYLAPKNPGTGPAFTIINGTLKYFETRYIRVDIAAPILSRMVGMISGTTTERELWDDWAPYEDVEIGPNGVLRTSSGYKFPLYMIGHGMLDSDLHLSSKAQVFEHPHIQDAASQLPDDESLFFGDTGLSKNPIELVEGWFSSWKSSIASFFFIIGLIIGLFLVLRVGIHLCIKLKHTKKRQIYTDIEMNRLGK

SEQ ID NO: 185 - protein, 381 aa, Artificial Sequence
  chemically synthesized
AVSVTPIRDTKWLTLEVCREFQRGTCSRPDTECKFAHPSKSCQVENGRVIACFDSLKGRCSRENCKYLHPPPHLKTQLEINGRNNLIQQKNMAMLAQQMQLANAMMPGAPLQPVPMFSVAPSLATNASAAAFNPYLGPVSPSLVPAEILPTAPMLVTGNPGVPVPAAAAAAAQKLMRTDRLEVCREYQRGNCNRGENDCRFAHPADSTMIDTNDNTVTVCMDYIKGRCSREKCKYFHPPAHLQAKIKAAQYQVNQAAAAQAAATAAAMGIPQAVLPPLPKRPALEKTNGATAVFNTGIFQYQQALANMQLQQHTAFLPPGSILCMTPATSVVPMVHGATPATVSAATTSATSVPFAATATANQIPIISAEHLTSHKYVTQM

SEQ ID NO: 186 - protein, 624 aa, Artificial Sequence
  chemically synthesized
MVSKGEEDNMAIIKEFMRFKVHMEGSVNGHEFEIEGEGEGRPYEGTQTAKLKVTKGGPLPFAWDILSPQFMYGSKAYVKHPADIPDYLKLSFPEGFKWERVMNFEDGGVVTVTQDSSLQDGEFIYKVKLRGTNFPSDGPVMQKKTMGWEASSERMYPEDGALKGEIKQRLKLKDGGHYDAEVKTTYKAKKPVQLPGAYNVNIKLDITSHNEDYTIVEQYERAEGRHSTGGMDELYKGNSRPLEAVSVTPIRDTKWLTLEVCREFQRGTCSRPDTECKFAHPSKSCQVENGRVIACFDSLKGRCSRENCKYLHPPPHLKTQLEINGRNNLIQQKNMAMLAQQMQLANAMMPGAPLQPVPMFSVAPSLATNASAAAFNPYLGPVSPSLVPAEILPTAPMLVTGNPGVPVPAAAAAAAQKLMRTDRLEVCREYQRGNCNRGENDCRFAHPADSTMIDTNDNTVTVCMDYIKGRCSREKCKYFHPPAHLQAKIKAAQYQVNQAAAAQAAATAAAMGIPQAVLPPLPKRPALEKTNGATAVFNTGIFQYQQALANMQLQQHTAFLPPGSILCMTPATSVVPMVHGATPATVSAATTSATSVPFAATATANQIPIISAEHLTSHKYVTQM

SEQ ID NO: 187 - protein, 607 aa, Artificial Sequence
  chemically synthesized
MEDAKNIKKGPAPFYPLEDGTAGEQLHKAMKRYALVPGTIAFTDAHIEVDITYAEYFEMSVRLAEAMKRYGLNTNHRIVVCSENSLQFFMPVLGALFIGVAVAPANDIYNERELLNSMGISQPTVVFVSKKGLQKILNVQKKLPIIQKIIIMDSKTDYQGFQSMYTFVTSHLPPGFNEYDFVPESFDRDKTIALIMNSSGSTGLPKGVALPHRTACVRFSHARDPIFGNQIIPDTAILSVVPFHHGFGMFTTLGYLICGFRVVLMYRFEEELFLRSLQDYKIQSALLVPTLFSFFAKSTLIDKYDLSNLHEIASGGAPLSKEVGEAVAKRFHLPGIRQGYGLTETTSAILITPEGDDKPGAVGKVVPFFEAKVVDLDTGKTLGVNQRGELCVRGPMIMSGYVNNPEATNALIDKDGWLHSGDIAYWDEDEHFFIVDRLKSLIKYKGYQVAPAELESILLQHPNIFDAGVAGLPDDDAGELPAAVVVLEHGKTMTEKEIVDYVASQVTTAKKLRGGVVFVDEVPKGLTGKLDARKIREILIKAKKGGKIAVACKNWFSSLSHFVIHLNSHGFPPEVEEQAAGTLPMSCAQESGMDRHPAACASARINV

SEQ ID NO: 188 - DNA, 3267 bp, Artificial Sequence
  chemically synthesized
aacatccccgctctggtggaaaaccagaagaagtactttggcacctacagcgtgatggccatgctgaacgctcagaccgtgctggaccacatccagaaggtggccgatattgagggcgagcagaacgagaacaacgagaatctgtggtttcaccccgtgatgagccacctgtacaacgccaagaacggctacgacaagcagcccgagaaaaccatgttcatcatcgagcggctgcagagctacttcccattcctgaagatcatggccgagaaccagagagagtacagcaacggcaagtacaagcagaaccgcgtggaagtgaacagcaacgacatcttcgaggtgctgaagcgcgccttcggcgtgctgaagatgtacagggacctgaccaaccactacaagacctacgaggaaaagctgaacgacggctgcgagttcctgaccagcacagagcaacctctgagcggcatgatcaacaactactacacagtggccctgcggaacatgaacgagagatacggctacaagacagaggacctggccttcatccaggacaagcggttcaagttcgtgaaggacgcctacggcaagaaaaagtcccaagtgaataccggattcttcctgagcctgcaggactacaacggcgacacacagaagaagctgcacctgagcggagtgggaatcgccctgctgatctgcctgttcctggacaagcagtacatcaacatctttctgagcaggctgcccatcttctccagctacaatgcccagagcgaggaacggcggatcatcatcagatccttcggcatcaacagcatcaagctgcccaaggaccggatccacagcgagaagtccaacaagagcgtggccatggatatgctcaacgaagtgaagcggtgccccgacgagctgttcacaacactgtctgccgagaagcagtcccggttcagaatcatcagcgacgaccacaatgaagtgctgatgaagcggagcagcgacagattcgtgcctctgctgctgcagtatatcgattacggcaagctgttcgaccacatcaggttccacgtgaacatgggcaagctgagatacctgctgaaggccgacaagacctgcatcgacggccagaccagagtcagagtgatcgagcagcccctgaacggcttcggcagactggaagaggccgagacaatgcggaagcaagagaacggcaccttcggcaacagcggcatccggatcagagacttcgagaacatgaagcgggacgacgccaatcctgccaactatccctacatcgtggacacctacacacactacatcctggaaaacaacaaggtcgagatgtttatcaacgacaaagaggacagcgccccactgctgcccgtgatcgaggatgatagatacgtggtcaagacaatccccagctgccggatgagcaccctggaaattccagccatggccttccacatgtttctgttcggcagcaagaaaaccgagaagctgatcgtggacgtgcacaaccggtacaagagactgttccaggccatgcagaaagaagaagtgaccgccgagaatatcgccagcttcggaatcgccgagagcgacctgcctcagaagatcctggatctgatcagcggcaatgcccacggcaaggatgtggacgccttcatcagactgaccgtggacgacatgctgaccgacaccgagcggagaatcaagagattcaaggacgaccggaagtccattcggagcgccgacaacaagatgggaaagagaggcttcaagcagatctccacaggcaagctggccgacttcctggccaaggacatcgtgctgtttcagcccagcgtgaacgatggcgagaacaagatcaccggcctgaactaccggatcatgcagagcgccattgccgtgtacgatagcggcgacgattacgaggccaagcagcagttcaagctgatgttcgagaaggcccggctgatcggcaagggcacaacagagcctcatccatttctgtacaaggtgttcgcccgcagcatccccgccaatgccgtcgagttctacgagcgctacctgatcgagcggaagttctacctgaccggcctgtccaacgagatcaagaaaggcaacagagtggatgtgcccttcatccggcgggaccagaacaagtggaaaacacccgccatgaagaccctgggcagaatctacagcgaggatctgcccgtggaactgcccagacagatgttcgacaatgagatcaagtcccacctgaagtccctgccacagatggaaggcatcgacttcaacaatgccaacgtgacctatctgatcgccgagtacatgaagagagtgctggacgacgacttccagaccttctaccagtggaaccgcaactaccggtacatggacatgcttaagggcgagtacgacagaaagggctccctgcagcactgcttcaccagcgtggaagagagagaaggcctctggaaagagcgggcctccagaacagagcggtacagaaagcaggccagcaacaagatccgcagcaaccggcagatgagaaacgccagcagcgaagagatcgagacaatcctggataagcggctgagcaacagccggaacgagtaccagaaaagcgagaaagtgatccggcgctacagagtgcaggatgccctgctgtttctgctggccaaaaagaccctgaccgaactggccgatttcgacggcgagaggttcaaactgaaagaaatcatgcccgacgccgagaagggaatcctgagcgagatcatgcccatgagcttcaccttcgagaaaggcggcaagaagtacaccatcaccagcgagggcatgaagctgaagaactacggcgacttctttgtgctggctagcgacaagaggatcggcaacctgctggaactcgtgggcagcgacatcgtgtccaaagaggatatcatggaagagttcaacaaatacgaccagtgcaggcccgagatcagctccatcgtgttcaacctggaaaagtgggccttcgacacataccccgagctgtctgccagagtggaccgggaagagaaggtggacttcaagagcatcctgaaaatcctgctgaacaacaagaacatcaacaaagagcagagcgacatcctgcggaagatccggaacgccttcgatcacaacaattaccccgacaaaggcgtggtggaaatcaaggccctgcctgagatcgccatgagcatcaagaaggcctttggggagtacgccatcatgaag

SEQ ID NO: 189 - DNA, 2946 bp, Artificial Sequence
  chemically synthesized
aacatccccgctctggtggaaaaccagaagaagtactttggcacctacagcgtgatggccatgctgaacgctcagaccgtgctggaccacatccagaaggtggccgatattgagggcgagcagaacgagaacaacgagaatctgtggtttcaccccgtgatgagccacctgtacaacgccaagaacggctacgacaagcagcccgagaaaaccatgttcatcatcgagcggctgcagagctacttcccattcctgaagatcatggccgagaaccagagagagtacagcaacggcaagtacaagcagaaccgcgtggaagtgaacagcaacgacatcttcgaggtgctgaagcgcgccttcggcgtgctgaagatgtacagggacctgaccaaccactacaagacctacgaggaaaagctgaacgacggctgcgagttcctgaccagcacagagcaacctctgagcggcatgatcaacaactactacacagtggccctgcggaacatgaacgagagatacggctacaagacagaggacctggccttcatccaggacaagcggttcaagttcgtgaaggacgcctacggcaagaaaaagtcccaagtgaataccggattcttcctgagcctgcaggactacaacggcgacacacagaagaagctgcacctgagcggagtgggaatcgccctgctgatctgcctgttcctggacaagcagtacatcaacatctttctgagcaggctgcccatcttctccagctacaatgcccagagcgaggaacggcggatcatcatcagatccttcggcatcaacagcatcaagctgcccaaggaccggatccacagcgagaagtccaacaagagcgtggccatggatatgctcaacgaagtgaagcggtgccccgacgagctgttcacaacactgtctgccgagaagcagtcccggttcagaatcatcagcgacgaccacaatgaagtgctgatgaagcggagcagcgacagattcgtgcctctgctgctgcagtatatcgattacggcaagctgttcgaccacatcaggttccacgtgaacatgggcaagctgagatacctgctgaaggccgacaagacctgcatcgacggccagaccagagtcagagtgatcgagcagcccctgaacggcttcggcagactggaagaggccgagacaatgcggaagcaagagaacggcaccttcggcaacagcggcatccggatcagagacttcgagaacatgaagcgggacgacgccaatcctgccaactatccctacatcgtggacacctacacacactacatcctggaaaacaacaaggtcgagatgtttatcaacgacaaagaggacagcgccccactgctgcccgtgatcgaggatgatagatacgtggtcaagacaatccccagctgccggatgagcaccctggaaattccagccatggccttccacatgtttctgttcggcagcaagaaaaccgagaagctgatcgtggacgtgcacaaccggtacaagagactgttccaggccatgcagaaagaagaagtgaccgccgagaatatcgccagcttcggaatcgccgagagcgacctgcctcagaagatcctggatctgatcagcggcaatgcccacggcaaggatgtggacgccttcatcagactgaccgtggacgacatgctgaccgacaccgagcggagaatcaagagattcaaggacgaccggaagtccattcggagcgccgacaacaagatgggaaagagaggcttcaagcagatctccacaggcaagctggccgacttcctggccaaggacatcgtgctgtttcagcccagcgtgaacgatggcgagaacaagatcaccggcctgaactaccggatcatgcagagcgccattgccgtgtacgatagcggcgacgattacgaggccaagcagcagttcaagctgatgttcgagaaggcccggctgatcggcaagggcacaacagagcctcatccatttctgtacaaggtgttcgcccgcagcatccccgccaatgccgtcgagttctacgagcgctacctgatcgagcggaagttctacctgaccggcctgtccaacgagatcaagaaaggcaacagagtggatgtgcccttcatccggcgggaccagaacaagtggaaaacacccgccatgaagaccctgggcagaatctacagcgaggatctgcccgtggaactgcccagacagatgttcgacaatgagatcaagtcccacctgaagtccctgccacagatggaaggcatcgacttcaacaatgccaacgtgacctatctgatcgccgagtacatgaagagagtgctggacgacgacttccagaccttctaccagtggaaccgcaactaccggtacatggacatgcttaagggcgagtacgacagaaagggctccctgcagcactgcttcaccagcgtggaagagagagaaggcctctggaaagagcgggcctccagaacagagcggtacagaaagcaggccagcaacaagatccgcagcaaccggcagatgagaaacgccagcagcgaagagatcgagacaatcctggataagcggctgagcaacagccggaacgagtaccagaaaagcgagaaagtgatccggcgctacagagtgcaggatgccctgctgtttctgctggccaaaaagaccctgaccgaactggccgatttcgacggcgagaggttcaaactgaaagaaatcatgcccgacgccgagaagggaatcctgagcgagatcatgcccatgagcttcaccttcgagaaaggcggcaagaagtacaccatcaccagcgagggcatgaagctgaagaactacggcgacttctttgtgctggctagcgacaagaggatcggcaacctgctggaactcgtgggcagcgacatcgtgtccaaagaggat

SEQ ID NO: 190 - DNA, 3267 bp, Artificial Sequence
  chemically synthesized
aacatccccgctctggtggaaaaccagaagaagtactttggcacctacagcgtgatggccatgctgaacgctcagaccgtgctggaccacatccagaaggtggccgatattgagggcgagcagaacgagaacaacgagaatctgtggtttcaccccgtgatgagccacctgtacaacgccaagaacggctacgacaagcagcccgagaaaaccatgttcatcatcgagcggctgcagagctacttcccattcctgaagatcatggccgagaaccagagagagtacagcaacggcaagtacaagcagaaccgcgtggaagtgaacagcaacgacatcttcgaggtgctgaagcgcgccttcggcgtgctgaagatgtacagggacctgaccaacgcatacaagacctacgaggaaaagctgaacgacggctgcgagttcctgaccagcacagagcaacctctgagcggcatgatcaacaactactacacagtggccctgcggaacatgaacgagagatacggctacaagacagaggacctggccttcatccaggacaagcggttcaagttcgtgaaggacgcctacggcaagaaaaagtcccaagtgaataccggattcttcctgagcctgcaggactacaacggcgacacacagaagaagctgcacctgagcggagtgggaatcgccctgctgatctgcctgttcctggacaagcagtacatcaacatctttctgagcaggctgcccatcttctccagctacaatgcccagagcgaggaacggcggatcatcatcagatccttcggcatcaacagcatcaagctgcccaaggaccggatccacagcgagaagtccaacaagagcgtggccatggatatgctcaacgaagtgaagcggtgccccgacgagctgttcacaacactgtctgccgagaagcagtcccggttcagaatcatcagcgacgaccacaatgaagtgctgatgaagcggagcagcgacagattcgtgcctctgctgctgcagtatatcgattacggcaagctgttcgaccacatcaggttccacgtgaacatgggcaagctgagatacctgctgaaggccgacaagacctgcatcgacggccagaccagagtcagagtgatcgagcagcccctgaacggcttcggcagactggaagaggccgagacaatgcggaagcaagagaacggcaccttcggcaacagcggcatccggatcagagacttcgagaacatgaagcgggacgacgccaatcctgccaactatccctacatcgtggacacctacacacactacatcctggaaaacaacaaggtcgagatgtttatcaacgacaaagaggacagcgccccactgctgcccgtgatcgaggatgatagatacgtggtcaagacaatccccagctgccggatgagcaccctggaaattccagccatggccttccacatgtttctgttcggcagcaagaaaaccgagaagctgatcgtggacgtgcacaaccggtacaagagactgttccaggccatgcagaaagaagaagtgaccgccgagaatatcgccagcttcggaatcgccgagagcgacctgcctcagaagatcctggatctgatcagcggcaatgcccacggcaaggatgtggacgccttcatcagactgaccgtggacgacatgctgaccgacaccgagcggagaatcaagagattcaaggacgaccggaagtccattcggagcgccgacaacaagatgggaaagagaggcttcaagcagatctccacaggcaagctggccgacttcctggccaaggacatcgtgctgtttcagcccagcgtgaacgatggcgagaacaagatcaccggcctgaactaccggatcatgcagagcgccattgccgtgtacgatagcggcgacgattacgaggccaagcagcagttcaagctgatgttcgagaaggcccggctgatcggcaagggcacaacagagcctcatccatttctgtacaaggtgttcgcccgcagcatccccgccaatgccgtcgagttctacgagcgctacctgatcgagcggaagttctacctgaccggcctgtccaacgagatcaagaaaggcaacagagtggatgtgcccttcatccggcgggaccagaacaagtggaaaacacccgccatgaagaccctgggcagaatctacagcgaggatctgcccgtggaactgcccagacagatgttcgacaatgagatcaagtcccacctgaagtccctgccacagatggaaggcatcgacttcaacaatgccaacgtgacctatctgatcgccgagtacatgaagagagtgctggacgacgacttccagaccttctaccagtggaaccgcaactaccggtacatggacatgcttaagggcgagtacgacagaaagggctccctgcagcactgcttcaccagcgtggaagagagagaaggcctctggaaagagcgggcctccagaacagagcggtacagaaagcaggccagcaacaagatccgcagcaaccggcagatgagaaacgccagcagcgaagagatcgagacaatcctggataagcggctgagcaacagccggaacgagtaccagaaaagcgagaaagtgatccggcgctacagagtgcaggatgccctgctgtttctgctggccaaaaagaccctgaccgaactggccgatttcgacggcgagaggttcaaactgaaagaaatcatgcccgacgccgagaagggaatcctgagcgagatcatgcccatgagcttcaccttcgagaaaggcggcaagaagtacaccatcaccagcgagggcatgaagctgaagaactacggcgacttctttgtgctggctagcgacaagaggatcggcaacctgctggaactcgtgggcagcgacatcgtgtccaaagaggatatcatggaagagttcaacaaatacgaccagtgcaggcccgagatcagctccatcgtgttcaacctggaaaagtgggccttcgacacataccccgagctgtctgccagagtggaccgggaagagaaggtggacttcaagagcatcctgaaaatcctgctgaacaacaagaacatcaacaaagagcagagcgacatcctgcggaagatccggaacgccttcgatgcaaacaattaccccgacaaaggcgtggtggaaatcaaggccctgcctgagatcgccatgagcatcaagaaggcctttggggagtacgccatcatgaag

SEQ ID NO: 191 - DNA, 2946 bp, Artificial Sequence
  chemically synthesized
aacatccccgctctggtggaaaaccagaagaagtactttggcacctacagcgtgatggccatgctgaacgctcagaccgtgctggaccacatccagaaggtggccgatattgagggcgagcagaacgagaacaacgagaatctgtggtttcaccccgtgatgagccacctgtacaacgccaagaacggctacgacaagcagcccgagaaaaccatgttcatcatcgagcggctgcagagctacttcccattcctgaagatcatggccgagaaccagagagagtacagcaacggcaagtacaagcagaaccgcgtggaagtgaacagcaacgacatcttcgaggtgctgaagcgcgccttcggcgtgctgaagatgtacagggacctgaccaacgcatacaagacctacgaggaaaagctgaacgacggctgcgagttcctgaccagcacagagcaacctctgagcggcatgatcaacaactactacacagtggccctgcggaacatgaacgagagatacggctacaagacagaggacctggccttcatccaggacaagcggttcaagttcgtgaaggacgcctacggcaagaaaaagtcccaagtgaataccggattcttcctgagcctgcaggactacaacggcgacacacagaagaagctgcacctgagcggagtgggaatcgccctgctgatctgcctgttcctggacaagcagtacatcaacatctttctgagcaggctgcccatcttctccagctacaatgcccagagcgaggaacggcggatcatcatcagatccttcggcatcaacagcatcaagctgcccaaggaccggatccacagcgagaagtccaacaagagcgtggccatggatatgctcaacgaagtgaagcggtgccccgacgagctgttcacaacactgtctgccgagaagcagtcccggttcagaatcatcagcgacgaccacaatgaagtgctgatgaagcggagcagcgacagattcgtgcctctgctgctgcagtatatcgattacggcaagctgttcgaccacatcaggttccacgtgaacatgggcaagctgagatacctgctgaaggccgacaagacctgcatcgacggccagaccagagtcagagtgatcgagcagcccctgaacggcttcggcagactggaagaggccgagacaatgcggaagcaagagaacggcaccttcggcaacagcggcatccggatcagagacttcgagaacatgaagcgggacgacgccaatcctgccaactatccctacatcgtggacacctacacacactacatcctggaaaacaacaaggtcgagatgtttatcaacgacaaagaggacagcgccccactgctgcccgtgatcgaggatgatagatacgtggtcaagacaatccccagctgccggatgagcaccctggaaattccagccatggccttccacatgtttctgttcggcagcaagaaaaccgagaagctgatcgtggacgtgcacaaccggtacaagagactgttccaggccatgcagaaagaagaagtgaccgccgagaatatcgccagcttcggaatcgccgagagcgacctgcctcagaagatcctggatctgatcagcggcaatgcccacggcaaggatgtggacgccttcatcagactgaccgtggacgacatgctgaccgacaccgagcggagaatcaagagattcaaggacgaccggaagtccattcggagcgccgacaacaagatgggaaagagaggcttcaagcagatctccacaggcaagctggccgacttcctggccaaggacatcgtgctgtttcagcccagcgtgaacgatggcgagaacaagatcaccggcctgaactaccggatcatgcagagcgccattgccgtgtacgatagcggcgacgattacgaggccaagcagcagttcaagctgatgttcgagaaggcccggctgatcggcaagggcacaacagagcctcatccatttctgtacaaggtgttcgcccgcagcatccccgccaatgccgtcgagttctacgagcgctacctgatcgagcggaagttctacctgaccggcctgtccaacgagatcaagaaaggcaacagagtggatgtgcccttcatccggcgggaccagaacaagtggaaaacacccgccatgaagaccctgggcagaatctacagcgaggatctgcccgtggaactgcccagacagatgttcgacaatgagatcaagtcccacctgaagtccctgccacagatggaaggcatcgacttcaacaatgccaacgtgacctatctgatcgccgagtacatgaagagagtgctggacgacgacttccagaccttctaccagtggaaccgcaactaccggtacatggacatgcttaagggcgagtacgacagaaagggctccctgcagcactgcttcaccagcgtggaagagagagaaggcctctggaaagagcgggcctccagaacagagcggtacagaaagcaggccagcaacaagatccgcagcaaccggcagatgagaaacgccagcagcgaagagatcgagacaatcctggataagcggctgagcaacagccggaacgagtaccagaaaagcgagaaagtgatccggcgctacagagtgcaggatgccctgctgtttctgctggccaaaaagaccctgaccgaactggccgatttcgacggcgagaggttcaaactgaaagaaatcatgcccgacgccgagaagggaatcctgagcgagatcatgcccatgagcttcaccttcgagaaaggcggcaagaagtacaccatcaccagcgagggcatgaagctgaagaactacggcgacttctttgtgctggctagcgacaagaggatcggcaacctgctggaactcgtgggcagcgacatcgtgtccaaagaggat

SEQ ID NO: 192 - DNA, 714 bp, Artificial Sequence
  chemically synthesized
gtgagcaagggcgaggagctgttcaccggggtggtgcccatcctggtcgagctggacggcgacgtaaacggccacaagttcagcgtgtccggcgagggcgagggcgatgccacctacggcaagctgaccctgaagttcatctgcaccaccggcaagctgcccgtgccctggcccaccctcgtgaccaccctgacctacggcgtgcagtgcttcagccgctaccccgaccacatgaagcagcacgacttcttcaagtccgccatgcccgaaggctacgtccaggagcgcaccatcttcttcaaggacgacggcaactacaagacccgcgccgaggtgaagttcgagggcgacaccctggtgaaccgcatcgagctgaagggcatcgacttcaaggaggacggcaacatcctggggcacaagctggagtacaactacaacagccacaacgtctatatcatggccgacaagcagaagaacggcatcaaggtgaacttcaagatccgccacaacatcgaggacggcagcgtgcagctcgccgaccactaccagcagaacacccccatcggcgacggccccgtgctgctgcccgacaaccactacctgagcacccagtccgccctgagcaaagaccccaacgagaagcgcgatcacatggtcctgctggagttcgtgaccgccgccgggatcactctcggcatggacgagctgtacaag

SEQ ID NO: 193 - DNA, 710 bp, Artificial Sequence
  chemically synthesized
atggtgagcaagggcgaggaggataacatggccatcatcaaggagttcatgcgcttcaaggtgcacatggagggctccgtgaacggccacgagttcgagatcgagggcgagggcgagggccgcccctacgagggcacccagaccgccaagctgaaggtgaccaagggtggccccctgcccttcgcctgggacatcctgtcccctcagttcatgtacggctccaaggcctacgtgaagcaccccgccgacatccccgactacttgaagctgtccttccccgagggcttcaagtgggagcgcgtgatgaacttcgaggacggcggcgtggtgaccgtgacccaggactcctccctgcaggacggcgagttcatctacaaggtgaagctgcgcggcaccaacttcccctccgacggccccgtaatgcagaagaagaccatgggctgggaggcctcctccgagcggatgtaccccgaggacggcgccctgaagggcgagatcaagcagaggctgaagctgaaggacggcggccactacgacgctgaggtcaagaccacctacaaggccaagaagcccgtgcagctgcccggcgcctacaacgtcaacatcaagttggacatcacctcccacaacgaggactacaccatcgtggaacagtacgaacgcgccgagggccgccactccaccggcggcatggacgagctgtacaaggg

SEQ ID NO: 194 - DNA, 432 bp, Artificial Sequence
  chemically synthesized
ggaggtagagatcacatggtactgcacgaatatgtaaatgctgcaggcatcactggtggctcaggagggcgcgaccacatggttttgcacgagtatgtgaacgccgccggaataacggggggttcaggaggccgggatcatatggttctccatgaatatgtcaacgcggctggtattacgggcggatcaggcgggcgggatcacatggttcttcacgaatacgtcaacgcggctggaattacaggtggttccggaggaagagatcacatggtactccacgaatatgttaatgctgcaggtataactggcggctctgggggtcgggatcatatggtgttgcatgaatacgtcaacgcagccgggataaccggaggttctggtggtcgagatcacatggtactccatgaatatgtaaatgcggctggaataaca

SEQ ID NO: 195 - DNA, 648 bp, Artificial Sequence
  chemically synthesized
atgagcaagggcgaagaactcttcacgggggtggtgccaatcctggtagaattggatggggatgtaaatggccataagttttctgtaaggggagaaggtgaaggggatgctacaattgggaaactgaccttgaagtttatctgtacaaccggcaagctgcctgtgccatggcccacattggttacgactctcacatacggcgtacagtgtttctccaggtatccggaccatatgaaacgacacgacttctttaagagcgcaatgccggagggttacgtacaagaacgaactatttccttcaaagacgacggtaaatataagaccagggcagtagttaagtttgaaggggatacgctcgtcaatcgcatagagttgaagggaacagactttaaagaggatggtaacatacttgggcataagctcgaatacaacttcaacagccacaacgtctacataaccgccgacaagcagaaaaacgggattaaagccaactttactgtgcggcacaatgttgaggatggctctgtgcagcttgctgaccactaccagcaaaatacccccattggagatgggcccgtcctgttgccggacaatcattatctgtctacgcaaactgtccttagcaaagacccaaacgagaaataataa

SEQ ID NO: 196 - DNA, 42 bp, Artificial Sequence
  chemically synthesized
tcgcgaggcggtggaggtagtggagggggaggatcaacgcgt

SEQ ID NO: 197 - DNA, 42 bp, Artificial Sequence; identical to SEQ ID NO: 196
  chemically synthesized

SEQ ID NO: 198 - DNA, 39 bp, Artificial Sequence
  chemically synthesized
cgaggcggtggaggtagtggagggggaggatcaacgcgt

SEQ ID NO: 199 - DNA, 39 bp, Artificial Sequence
  chemically synthesized
ggcggtggaggtagtggagggggaggatcactcgagcca

SEQ ID NO: 200 - DNA, 66 bp, Artificial Sequence
  chemically synthesized
gactacaaagaccatgacggtgattataaagatcatgacatcgattacaaggatgacgatgacaag

SEQ ID NO: 201 - DNA, 117 bp, Artificial Sequence
  chemically synthesized
aactcaaagaaaaggtcactggaggacaacgaaacggaaatcaaagtctccagagacacctggaacactaagaacatgcggtccctggaaccgccacgaagcaagaaacggatacat

SEQ ID NO: 202 - DNA, 33 bp, Artificial Sequence
  chemically synthesized
cttcaactgcctccacttgaaagactgacactg

SEQ ID NO: 203 - DNA, 48 bp, Artificial Sequence
  chemically synthesized
ggatcccttcaactgcctccacttgaaagactgacactgggtagttcc

SEQ ID NO: 204 - DNA, 96 bp, Artificial Sequence
  chemically synthesized
atgagtgtgttgacgccgttgcttctgcgagggcttaccgggtctgctagaagacttccggtccccagggccaagatacatagcctcggagacccg

SEQ ID NO: 205 - DNA, 390 bp, Artificial Sequence
  chemically synthesized
atgagtgtgttgacgccgttgcttctgcgagggcttaccgggtctgctagaagacttccggtccccagggccaagatacatagcctcggagacccgatgtctgtgctcactcctctgcttttgcgaggactgactgggtccgccagacgactcccggtgccgagagctaaaatccatagcctgggaaaattggcaactatgtcagtcctgacgccgcttcttctccggggtcttacagggtctgcaagaaggctgcctgtacctcgggcgaaaattcatagcttgggcgacccgatgagtgtattgacgcccctgttgctgagaggattgactgggtcagcgcgccggctccctgtcccccgagctaagattcactcccttggtaagctg

SEQ ID NO: 206 - DNA, 60 bp, Artificial Sequence
  chemically synthesized
atgtacaggatgcaactcctgtcttgcattgcactaagtcttgcacttgtcacgaattcc

SEQ ID NO: 207 - DNA, 129 bp, Artificial Sequence
  chemically synthesized
atgggttgttgtttcagcaagacagcggcgaaaggtgaagcagcagcagaaagaccaggcgaggctgcggtagcatcaagtccctccaaggctaatgggcaggaaaacggacacgtcaaagttggaagc

SEQ ID NO: 208 - DNA, 51 bp, Artificial Sequence
  chemically synthesized
atgctgctgcccgtccccctgctgctgggcctgctgggcgccgccgccgac

SEQ ID NO: 209 - DNA, 30 bp, Artificial Sequence
  chemically synthesized
gggatcactctcggcaaggacgagctgtaa

SEQ ID NO: 210 - DNA, 12 bp, Artificial Sequence
  chemically synthesized
tccaaattataa

SEQ ID NO: 211 - DNA, 4227 bp, Artificial Sequence
  chemically synthesized
atggactacaaagaccatgacggtgattataaagatcatgacatcgattacaaggatgacgatgacaagggcggaaactcaaagaaaaggtcactggaggacaacgaaacggaaatcaaagtctccagagacacctggaacactaagaacatgcggtccctggaaccgccacgaagcaagaaacggatacatggaggcaacatccccgctctggtggaaaaccagaagaagtactttggcacctacagcgtgatggccatgctgaacgctcagaccgtgctggaccacatccagaaggtggccgatattgagggcgagcagaacgagaacaacgagaatctgtggtttcaccccgtgatgagccacctgtacaacgccaagaacggctacgacaagcagcccgagaaaaccatgttcatcatcgagcggctgcagagctacttcccattcctgaagatcatggccgagaaccagagagagtacagcaacggcaagtacaagcagaaccgcgtggaagtgaacagcaacgacatcttcgaggtgctgaagcgcgccttcggcgtgctgaagatgtacagggacctgaccaacgcatacaagacctacgaggaaaagctgaacgacggctgcgagttcctgaccagcacagagcaacctctgagcggcatgatcaacaactactacacagtggccctgcggaacatgaacgagagatacggctacaagacagaggacctggccttcatccaggacaagcggttcaagttcgtgaaggacgcctacggcaagaaaaagtcccaagtgaataccggattcttcctgagcctgcaggactacaacggcgacacacagaagaagctgcacctgagcggagtgggaatcgccctgctgatctgcctgttcctggacaagcagtacatcaacatctttctgagcaggctgcccatcttctccagctacaatgcccagagcgaggaacggcggatcatcatcagatccttcggcatcaacagcatcaagctgcccaaggaccggatccacagcgagaagtccaacaagagcgtggccatggatatgctcaacgaagtgaagcggtgccccgacgagctgttcacaacactgtctgccgagaagcagtcccggttcagaatcatcagcgacgaccacaatgaagtgctgatgaagcggagcagcgacagattcgtgcctctgctgctgcagtatatcgattacggcaagctgttcgaccacatcaggttccacgtgaacatgggcaagctgagatacctgctgaaggccgacaagacctgcatcgacggccagaccagagtcagagtgatcgagcagcccctgaacggcttcggcagactggaagaggccgagacaatgcggaagcaagagaacggcaccttcggcaacagcggcatccggatcagagacttcgagaacatgaagcgggacgacgccaatcctgccaactatccctacatcgtggacacctacacacactacatcctggaaaacaacaaggtcgagatgtttatcaacgacaaagaggacagcgccccactgctgcccgtgatcgaggatgatagatacgtggtcaagacaatccccagctgccggatgagcaccctggaaattccagccatggccttccacatgtttctgttcggcagcaagaaaaccgagaagctgatcgtggacgtgcacaaccggtacaagagactgttccaggccatgcagaaagaagaagtgaccgccgagaatatcgccagcttcggaatcgccgagagcgacctgcctcagaagatcctggatctgatcagcggcaatgcccacggcaaggatgtggacgccttcatcagactgaccgtggacgacatgctgaccgacaccgagcggagaatcaagagattcaaggacgaccggaagtccattcggagcgccgacaacaagatgggaaagagaggcttcaagcagatctccacaggcaagctggccgacttcctggccaaggacatcgtgctgtttcagcccagcgtgaacgatggcgagaacaagatcaccggcctgaactaccggatcatgcagagcgccattgccgtgtacgatagcggcgacgattacgaggccaagcagcagttcaagctgatgttcgagaaggcccggctgatcggcaagggcacaacagagcctcatccatttctgtacaaggtgttcgcccgcagcatccccgccaatgccgtcgagttctacgagcgctacctgatcgagcggaagttctacctgaccggcctgtccaacgagatcaagaaaggcaacagagtggatgtgcccttcatccggcgggaccagaacaagtggaaaacacccgccatgaagaccctgggcagaatctacagcgaggatctgcccgtggaactgcccagacagatgttcgacaatgagatcaagtcccacctgaagtccctgccacagatggaaggcatcgacttcaacaatgccaacgtgacctatctgatcgccgagtacatgaagagagtgctggacgacgacttccagaccttctaccagtggaaccgcaactaccggtacatggacatgcttaagggcgagtacgacagaaagggctccctgcagcactgcttcaccagcgtggaagagagagaaggcctctggaaagagcgggcctccagaacagagcggtacagaaagcaggccagcaacaagatccgcagcaaccggcagatgagaaacgccagcagcgaagagatcgagacaatcctggataagcggctgagcaacagccggaacgagtaccagaaaagcgagaaagtgatccggcgctacagagtgcaggatgccctgctgtttctgctggccaaaaagaccctgaccgaactggccgatttcgacggcgagaggttcaaactgaaagaaatcatgcccgacgccgagaagggaatcctgagcgagatcatgcccatgagcttcaccttcgagaaaggcggcaagaagtacaccatcaccagcgagggcatgaagctgaagaactacggcgacttctttgtgctggctagcgacaagaggatcggcaacctgctggaactcgtgggcagcgacatcgtgtccaaagaggatatcatggaagagttcaacaaatacgaccagtgcaggcccgagatcagctccatcgtgttcaacctggaaaagtgggccttcgacacataccccgagctgtctgccagagtggaccgggaagagaaggtggacttcaagagcatcctgaaaatcctgctgaacaacaagaacatcaacaaagagcagagcgacatcctgcggaagatccggaacgccttcgatgcaaacaattaccccgacaaaggcgtggtggaaatcaaggccctgcctgagatcgccatgagcatcaagaaggcctttggggagtacgccatcatgaagtcgcgaggcggtggaggtagtggagggggaggatcaacgcgtgtgagcaagggcgaggagctgttcaccggggtggtgcccatcctggtcgagctggacggcgacgtaaacggccacaagttcagcgtgtccggcgagggcgagggcgatgccacctacggcaagctgaccctgaagttcatctgcaccaccggcaagctgcccgtgccctggcccaccctcgtgaccaccctgacctacggcgtgcagtgcttcagccgctaccccgaccacatgaagcagcacgacttcttcaagtccgccatgcccgaaggctacgtccaggagcgcaccatcttcttcaaggacgacggcaactacaagacccgcgccgaggtgaagttcgagggcgacaccctggtgaaccgcatcgagctgaagggcatcgacttcaaggaggacggcaacatcctggggcacaagctggagtacaactacaacagccacaacgtctatatcatggccgacaagcagaagaacggcatcaaggtgaacttcaagatccgccacaacatcgaggacggcagcgtgcagctcgccgaccactaccagcagaacacccccatcggcgacggccccgtgctgctgcccgacaaccactacctgagcacccagtccgccctgagcaaagaccccaacgagaagcgcgatcacatggtcctgctggagttcgtgaccgccgccgggatcactctcggcatggacgagctgtacaagtagtaa

SEQ ID NO: 212 - DNA, 4143 bp, Artificial Sequence
  chemically synthesized
atggactacaaagaccatgacggtgattataaagatcatgacatcgattacaaggatgacgatgacaagggcggacttcaactgcctccacttgaaagactgacactgggaggcaacatccccgctctggtggaaaaccagaagaagtactttggcacctacagcgtgatggccatgctgaacgctcagaccgtgctggaccacatccagaaggtggccgatattgagggcgagcagaacgagaacaacgagaatctgtggtttcaccccgtgatgagccacctgtacaacgccaagaacggctacgacaagcagcccgagaaaaccatgttcatcatcgagcggctgcagagctacttcccattcctgaagatcatggccgagaaccagagagagtacagcaacggcaagtacaagcagaaccgcgtggaagtgaacagcaacgacatcttcgaggtgctgaagcgcgccttcggcgtgctgaagatgtacagggacctgaccaacgcatacaagacctacgaggaaaagctgaacgacggctgcgagttcctgaccagcacagagcaacctctgagcggcatgatcaacaactactacacagtggccctgcggaacatgaacgagagatacggctacaagacagaggacctggccttcatccaggacaagcggttcaagttcgtgaaggacgcctacggcaagaaaaagtcccaagtgaataccggattcttcctgagcctgcaggactacaacggcgacacacagaagaagctgcacctgagcggagtgggaatcgccctgctgatctgcctgttcctggacaagcagtacatcaacatctttctgagcaggctgcccatcttctccagctacaatgcccagagcgaggaacggcggatcatcatcagatccttcggcatcaacagcatcaagctgcccaaggaccggatccacagcgagaagtccaacaagagcgtggccatggatatgctcaacgaagtgaagcggtgccccgacgagctgttcacaacactgtctgccgagaagcagtcccggttcagaatcatcagcgacgaccacaatgaagtgctgatgaagcggagcagcgacagattcgtgcctctgctgctgcagtatatcgattacggcaagctgttcgaccacatcaggttccacgtgaacatgggcaagctgagatacctgctgaaggccgacaagacctgcatcgacggccagaccagagtcagagtgatcgagcagcccctgaacggcttcggcagactggaagaggccgagacaatgcggaagcaagagaacggcaccttcggcaacagcggcatccggatcagagacttcgagaacatgaagcgggacgacgccaatcctgccaactatccctacatcgtggacacctacacacactacatcctggaaaacaacaaggtcgagatgtttatcaacgacaaagaggacagcgccccactgctgcccgtgatcgaggatgatagatacgtggtcaagacaatccccagctgccggatgagcaccctggaaattccagccatggccttccacatgtttctgttcggcagcaagaaaaccgagaagctgatcgtggacgtgcacaaccggtacaagagactgttccaggccatgcagaaagaagaagtgaccgccgagaatatcgccagcttcggaatcgccgagagcgacctgcctcagaagatcctggatctgatcagcggcaatgcccacggcaaggatgtggacgccttcatcagactgaccgtggacgacatgctgaccgacaccgagcggagaatcaagagattcaaggacgaccggaagtccattcggagcgccgacaacaagatgggaaagagaggcttcaagcagatctccacaggcaagctggccgacttcctggccaaggacatcgtgctgtttcagcccagcgtgaacgatggcgagaacaagatcaccggcctgaactaccggatcatgcagagcgccattgccgtgtacgatagcggcgacgattacgaggccaagcagcagttcaagctgatgttcgagaaggcccggctgatcggcaagggcacaacagagcctcatccatttctgtacaaggtgttcgcccgcagcatccccgccaatgccgtcgagttctacgagcgctacctgatcgagcggaagttctacctgaccggcctgtccaacgagatcaagaaaggcaacagagtggatgtgcccttcatccggcgggaccagaacaagtggaaaacacccgccatgaagaccctgggcagaatctacagcgaggatctgcccgtggaactgcccagacagatgttcgacaatgagatcaagtcccacctgaagtccctgccacagatggaaggcatcgacttcaacaatgccaacgtgacctatctgatcgccgagtacatgaagagagtgctggacgacgacttccagaccttctaccagtggaaccgcaactaccggtacatggacatgcttaagggcgagtacgacagaaagggctccctgcagcactgcttcaccagcgtggaagagagagaaggcctctggaaagagcgggcctccagaacagagcggtacagaaagcaggccagcaacaagatccgcagcaaccggcagatgagaaacgccagcagcgaagagatcgagacaatcctggataagcggctgagcaacagccggaacgagtaccagaaaagcgagaaagtgatccggcgctacagagtgcaggatgccctgctgtttctgctggccaaaaagaccctgaccgaactggccgatttcgacggcgagaggttcaaactgaaagaaatcatgcccgacgccgagaagggaatcctgagcgagatcatgcccatgagcttcaccttcgagaaaggcggcaagaagtacaccatcaccagcgagggcatgaagctgaagaactacggcgacttctttgtgctggctagcgacaagaggatcggcaacctgctggaactcgtgggcagcgacatcgtgtccaaagaggatatcatggaagagttcaacaaatacgaccagtgcaggcccgagatcagctccatcgtgttcaacctggaaaagtgggccttcgacacataccccgagctgtctgccagagtggaccgggaagagaaggtggacttcaagagcatcctgaaaatcctgctgaacaacaagaacatcaacaaagagcagagcgacatcctgcggaagatccggaacgccttcgatgcaaacaattaccccgacaaaggcgtggtggaaatcaaggccctgcctgagatcgccatgagcatcaagaaggcctttggggagtacgccatcatgaagtcgcgaggcggtggaggtagtggagggggaggatcaacgcgtgtgagcaagggcgaggagctgttcaccggggtggtgcccatcctggtcgagctggacggcgacgtaaacggccacaagttcagcgtgtccggcgagggcgagggcgatgccacctacggcaagctgaccctgaagttcatctgcaccaccggcaagctgcccgtgccctggcccaccctcgtgaccaccctgacctacggcgtgcagtgcttcagccgctaccccgaccacatgaagcagcacgacttcttcaagtccgccatgcccgaaggctacgtccaggagcgcaccatcttcttcaaggacgacggcaactacaagacccgcgccgaggtgaagttcgagggcgacaccctggtgaaccgcatcgagctgaagggcatcgacttcaaggaggacggcaacatcctggggcacaagctggagtacaactacaacagccacaacgtctatatcatggccgacaagcagaagaacggcatcaaggtgaacttcaagatccgccacaacatcgaggacggcagcgtgcagctcgccgaccactaccagcagaacacccccatcggcgacggccccgtgctgctgcccgacaaccactacctgagcacccagtccgccctgagcaaagaccccaacgagaagcgcgatcacatggtcctgctggagttcgtgaccgccgccgggatcactctcggcatggacgagctgtacaagtagtaa

SEQ ID NO: 213 - DNA, 4158 bp, Artificial Sequence
  chemically synthesized
atggactacaaagaccatgacggtgattataaagatcatgacatcgattacaaggatgacgatgacaagggcggaggatcccttcaactgcctccacttgaaagactgacactgggtagttccggaggcaacatccccgctctggtggaaaaccagaagaagtactttggcacctacagcgtgatggccatgctgaacgctcagaccgtgctggaccacatccagaaggtggccgatattgagggcgagcagaacgagaacaacgagaatctgtggtttcaccccgtgatgagccacctgtacaacgccaagaacggctacgacaagcagcccgagaaaaccatgttcatcatcgagcggctgcagagctacttcccattcctgaagatcatggccgagaaccagagagagtacagcaacggcaagtacaagcagaaccgcgtggaagtgaacagcaacgacatcttcgaggtgctgaagcgcgccttcggcgtgctgaagatgtacagggacctgaccaacgcatacaagacctacgaggaaaagctgaacgacggctgcgagttcctgaccagcacagagcaacctctgagcggcatgatcaacaactactacacagtggccctgcggaacatgaacgagagatacggctacaagacagaggacctggccttcatccaggacaagcggttcaagttcgtgaaggacgcctacggcaagaaaaagtcccaagtgaataccggattcttcctgagcctgcaggactacaacggcgacacacagaagaagctgcacctgagcggagtgggaatcgccctgctgatctgcctgttcctggacaagcagtacatcaacatctttctgagcaggctgcccatcttctccagctacaatgcccagagcgaggaacggcggatcatcatcagatccttcggcatcaacagcatcaagctgcccaaggaccggatccacagcgagaagtccaacaagagcgtggccatggatatgctcaacgaagtgaagcggtgccccgacgagctgttcacaacactgtctgccgagaagcagtcccggttcagaatcatcagcgacgaccacaatgaagtgctgatgaagcggagcagcgacagattcgtgcctctgctgctgcagtatatcgattacggcaagctgttcgaccacatcaggttccacgtgaacatgggcaagctgagatacctgctgaaggccgacaagacctgcatcgacggccagaccagagtcagagtgatcgagcagcccctgaacggcttcggcagactggaagaggccgagacaatgcggaagcaagagaacggcaccttcggcaacagcggcatccggatcagagacttcgagaacatgaagcgggacgacgccaatcctgccaactatccctacatcgtggacacctacacacactacatcctggaaaacaacaaggtcgagatgtttatcaacgacaaagaggacagcgccccactgctgcccgtgatcgaggatgatagatacgtggtcaagacaatccccagctgccggatgagcaccctggaaattccagccatggccttccacatgtttctgttcggcagcaagaaaaccgagaagctgatcgtggacgtgcacaaccggtacaagagactgttccaggccatgcagaaagaagaagtgaccgccgagaatatcgccagcttcggaatcgccgagagcgacctgcctcagaagatcctggatctgatcagcggcaatgcccacggcaaggatgtggacgccttcatcagactgaccgtggacgacatgctgaccgacaccgagcggagaatcaagagattcaaggacgaccggaagtccattcggagcgccgacaacaagatgggaaagagaggcttcaagcagatctccacaggcaagctggccgacttcctggccaaggacatcgtgctgtttcagcccagcgtgaacgatggcgagaacaagatcaccggcctgaactaccggatcatgcagagcgccattgccgtgtacgatagcggcgacgattacgaggccaagcagcagttcaagctgatgttcgagaaggcccggctgatcggcaagggcacaacagagcctcatccatttctgtacaaggtgttcgcccgcagcatccccgccaatgccgtcgagttctacgagcgctacctgatcgagcggaagttctacctgaccggcctgtccaacgagatcaagaaaggcaacagagtggatgtgcccttcatccggcgggaccagaacaagtggaaaacacccgccatgaagaccctgggcagaatctacagcgaggatctgcccgtggaactgcccagacagatgttcgacaatgagatcaagtcccacctgaagtccctgccacagatggaaggcatcgacttcaacaatgccaacgtgacctatctgatcgccgagtacatgaagagagtgctggacgacgacttccagaccttctaccagtggaaccgcaactaccggtacatggacatgcttaagggcgagtacgacagaaagggctccctgcagcactgcttcaccagcgtggaagagagagaaggcctctggaaagagcgggcctccagaacagagcggtacagaaagcaggccagcaacaagatccgcagcaaccggcagatgagaaacgccagcagcgaagagatcgagacaatcctggataagcggctgagcaacagccggaacgagtaccagaaaagcgagaaagtgatccggcgctacagagtgcaggatgccctgctgtttctgctggccaaaaagaccctgaccgaactggccgatttcgacggcgagaggttcaaactgaaagaaatcatgcccgacgccgagaagggaatcctgagcgagatcatgcccatgagcttcaccttcgagaaaggcggcaagaagtacaccatcaccagcgagggcatgaagctgaagaactacggcgacttctttgtgctggctagcgacaagaggatcggcaacctgctggaactcgtgggcagcgacatcgtgtccaaagaggatatcatggaagagttcaacaaatacgaccagtgcaggcccgagatcagctccatcgtgttcaacctggaaaagtgggccttcgacacataccccgagctgtctgccagagtggaccgggaagagaaggtggacttcaagagcatcctgaaaatcctgctgaacaacaagaacatcaacaaagagcagagcgacatcctgcggaagatccggaacgccttcgatgcaaacaattaccccgacaaaggcgtggtggaaatcaaggccctgcctgagatcgccatgagcatcaagaaggcctttggggagtacgccatcatgaagtcgcgaggcggtggaggtagtggagggggaggatcaacgcgtgtgagcaagggcgaggagctgttcaccggggtggtgcccatcctggtcgagctggacggcgacgtaaacggccacaagttcagcgtgtccggcgagggcgagggcgatgccacctacggcaagctgaccctgaagttcatctgcaccaccggcaagctgcccgtgccctggcccaccctcgtgaccaccctgacctacggcgtgcagtgcttcagccgctaccccgaccacatgaagcagcacgacttcttcaagtccgccatgcccgaaggctacgtccaggagcgcaccatcttcttcaaggacgacggcaactacaagacccgcgccgaggtgaagttcgagggcgacaccctggtgaaccgcatcgagctgaagggcatcgacttcaaggaggacggcaacatcctggggcacaagctggagtacaactacaacagccacaacgtctatatcatggccgacaagcagaagaacggcatcaaggtgaacttcaagatccgccacaacatcgaggacggcagcgtgcagctcgccgaccactaccagcagaacacccccatcggcgacggccccgtgctgctgcccgacaaccactacctgagcacccagtccgccctgagcaaagaccccaacgagaagcgcgatcacatggtcctgctggagttcgtgaccgccgccgggatcactctcggcatggacgagctgtacaagtagtaa

SEQ ID NO: 214 - DNA, 4206 bp, Artificial Sequence
  chemically synthesized
atggactacaaagaccatgacggtgattataaagatcatgacatcgattacaaggatgacgatgacaagggcggaatgagtgtgttgacgccgttgcttctgcgagggcttaccgggtctgctagaagacttccggtccccagggccaagatacatagcctcggagacccgggaggcaacatccccgctctggtggaaaaccagaagaagtactttggcacctacagcgtgatggccatgctgaacgctcagaccgtgctggaccacatccagaaggtggccgatattgagggcgagcagaacgagaacaacgagaatctgtggtttcaccccgtgatgagccacctgtacaacgccaagaacggctacgacaagcagcccgagaaaaccatgttcatcatcgagcggctgcagagctacttcccattcctgaagatcatggccgagaaccagagagagtacagcaacggcaagtacaagcagaaccgcgtggaagtgaacagcaacgacatcttcgaggtgctgaagcgcgccttcggcgtgctgaagatgtacagggacctgaccaacgcatacaagacctacgaggaaaagctgaacgacggctgcgagttcctgaccagcacagagcaacctctgagcggcatgatcaacaactactacacagtggccctgcggaacatgaacgagagatacggctacaagacagaggacctggccttcatccaggacaagcggttcaagttcgtgaaggacgcctacggcaagaaaaagtcccaagtgaataccggattcttcctgagcctgcaggactacaacggcgacacacagaagaagctgcacctgagcggagtgggaatcgccctgctgatctgcctgttcctggacaagcagtacatcaacatctttctgagcaggctgcccatcttctccagctacaatgcccagagcgaggaacggcggatcatcatcagatccttcggcatcaacagcatcaagctgcccaaggaccggatccacagcgagaagtccaacaagagcgtggccatggatatgctcaacgaagtgaagcggtgccccgacgagctgttcacaacactgtctgccgagaagcagtcccggttcagaatcatcagcgacgaccacaatgaagtgctgatgaagcggagcagcgacagattcgtgcctctgctgctgcagtatatcgattacggcaagctgttcgaccacatcaggttccacgtgaacatgggcaagctgagatacctgctgaaggccgacaagacctgcatcgacggccagaccagagtcagagtgatcgagcagcccctgaacggcttcggcagactggaagaggccgagacaatgcggaagcaagagaacggcaccttcggcaacagcggcatccggatcagagacttcgagaacatgaagcgggacgacgccaatcctgccaactatccctacatcgtggacacctacacacactacatcctggaaaacaacaaggtcgagatgtttatcaacgacaaagaggacagcgccccactgctgcccgtgatcgaggatgatagatacgtggtcaagacaatccccagctgccggatgagcaccctggaaattccagccatggccttccacatgtttctgttcggcagcaagaaaaccgagaagctgatcgtggacgtgcacaaccggtacaagagactgttccaggccatgcagaaagaagaagtgaccgccgagaatatcgccagcttcggaatcgccgagagcgacctgcctcagaagatcctggatctgatcagcggcaatgcccacggcaaggatgtggacgccttcatcagactgaccgtggacgacatgctgaccgacaccgagcggagaatcaagagattcaaggacgaccggaagtccattcggagcgccgacaacaagatgggaaagagaggcttcaagcagatctccacaggcaagctggccgacttcctggccaaggacatcgtgctgtttcagcccagcgtgaacgatggcgagaacaagatcaccggcctgaactaccggatcatgcagagcgccattgccgtgtacgatagcggcgacgattacgaggccaagcagcagttcaagctgatgttcgagaaggcccggctgatcggcaagggcacaacagagcctcatccatttctgtacaaggtgttcgcccgcagcatccccgccaatgccgtcgagttctacgagcgctacctgatcgagcggaagttctacctgaccggcctgtccaacgagatcaagaaaggcaacagagtggatgtgcccttcatccggcgggaccagaacaagtggaaaacacccgccatgaagaccctgggcagaatctacagcgaggatctgcccgtggaactgcccagacagatgttcgacaatgagatcaagtcccacctgaagtccctgccacagatggaaggcatcgacttcaacaatgccaacgtgacctatctgatcgccgagtacatgaagagagtgctggacgacgacttccagaccttctaccagtggaaccgcaactaccggtacatggacatgcttaagggcgagtacgacagaaagggctccctgcagcactgcttcaccagcgtggaagagagagaaggcctctggaaagagcgggcctccagaacagagcggtacagaaagcaggccagcaacaagatccgcagcaaccggcagatgagaaacgccagcagcgaagagatcgagacaatcctggataagcggctgagcaacagccggaacgagtaccagaaaagcgagaaagtgatccggcgctacagagtgcaggatgccctgctgtttctgctggccaaaaagaccctgaccgaactggccgatttcgacggcgagaggttcaaactgaaagaaatcatgcccgacgccgagaagggaatcctgagcgagatcatgcccatgagcttcaccttcgagaaaggcggcaagaagtacaccatcaccagcgagggcatgaagctgaagaactacggcgacttctttgtgctggctagcgacaagaggatcggcaacctgctggaactcgtgggcagcgacatcgtgtccaaagaggatatcatggaagagttcaacaaatacgaccagtgcaggcccgagatcagctccatcgtgttcaacctggaaaagtgggccttcgacacataccccgagctgtctgccagagtggaccgggaagagaaggtggacttcaagagcatcctgaaaatcctgctgaacaacaagaacatcaacaaagagcagagcgacatcctgcggaagatccggaacgccttcgatgcaaacaattaccccgacaaaggcgtggtggaaatcaaggccctgcctgagatcgccatgagcatcaagaaggcctttggggagtacgccatcatgaagtcgcgaggcggtggaggtagtggagggggaggatcaacgcgtgtgagcaagggcgaggagctgttcaccggggtggtgcccatcctggtcgagctggacggcgacgtaaacggccacaagttcagcgtgtccggcgagggcgagggcgatgccacctacggcaagctgaccctgaagttcatctgcaccaccggcaagctgcccgtgccctggcccaccctcgtgaccaccctgacctacggcgtgcagtgcttcagccgctaccccgaccacatgaagcagcacgacttcttcaagtccgccatgcccgaaggctacgtccaggagcgcaccatcttcttcaaggacgacggcaactacaagacccgcgccgaggtgaagttcgagggcgacaccctggtgaaccgcatcgagctgaagggcatcgacttcaaggaggacggcaacatcctggggcacaagctggagtacaactacaacagccacaacgtctatatcatggccgacaagcagaagaacggcatcaaggtgaacttcaagatccgccacaacatcgaggacggcagcgtgcagctcgccgaccactaccagcagaacacccccatcggcgacggccccgtgctgctgcccgacaaccactacctgagcacccagtccgccctgagcaaagaccccaacgagaagcgcgatcacatggtcctgctggagttcgtgaccgccgccgggatcactctcggcatggacgagctgtacaagtagtaa

SEQ ID NO: 215 - DNA, 4500 bp, Artificial Sequence
  chemically synthesized
atggactacaaagaccatgacggtgattataaagatcatgacatcgattacaaggatgacgatgacaagggcggaatgagtgtgttgacgccgttgcttctgcgagggcttaccgggtctgctagaagacttccggtccccagggccaagatacatagcctcggagacccgatgtctgtgctcactcctctgcttttgcgaggactgactgggtccgccagacgactcccggtgccgagagctaaaatccatagcctgggaaaattggcaactatgtcagtcctgacgccgcttcttctccggggtcttacagggtctgcaagaaggctgcctgtacctcgggcgaaaattcatagcttgggcgacccgatgagtgtattgacgcccctgttgctgagaggattgactgggtcagcgcgccggctccctgtcccccgagctaagattcactcccttggtaagctgggaggcaacatccccgctctggtggaaaaccagaagaagtactttggcacctacagcgtgatggccatgctgaacgctcagaccgtgctggaccacatccagaaggtggccgatattgagggcgagcagaacgagaacaacgagaatctgtggtttcaccccgtgatgagccacctgtacaacgccaagaacggctacgacaagcagcccgagaaaaccatgttcatcatcgagcggctgcagagctacttcccattcctgaagatcatggccgagaaccagagagagtacagcaacggcaagtacaagcagaaccgcgtggaagtgaacagcaacgacatcttcgaggtgctgaagcgcgccttcggcgtgctgaagatgtacagggacctgaccaacgcatacaagacctacgaggaaaagctgaacgacggctgcgagttcctgaccagcacagagcaacctctgagcggcatgatcaacaactactacacagtggccctgcggaacatgaacgagagatacggctacaagacagaggacctggccttcatccaggacaagcggttcaagttcgtgaaggacgcctacggcaagaaaaagtcccaagtgaataccggattcttcctgagcctgcaggactacaacggcgacacacagaagaagctgcacctgagcggagtgggaatcgccctgctgatctgcctgttcctggacaagcagtacatcaacatctttctgagcaggctgcccatcttctccagctacaatgcccagagcgaggaacggcggatcatcatcagatccttcggcatcaacagcatcaagctgcccaaggaccggatccacagcgagaagtccaacaagagcgtggccatggatatgctcaacgaagtgaagcggtgccccgacgagctgttcacaacactgtctgccgagaagcagtcccggttcagaatcatcagcgacgaccacaatgaagtgctgatgaagcggagcagcgacagattcgtgcctctgctgctgcagtatatcgattacggcaagctgttcgaccacatcaggttccacgtgaacatgggcaagctgagatacctgctgaaggccgacaagacctgcatcgacggccagaccagagtcagagtgatcgagcagcccctgaacggcttcggcagactggaagaggccgagacaatgcggaagcaagagaacggcaccttcggcaacagcggcatccggatcagagacttcgagaacatgaagcgggacgacgccaatcctgccaactatccctacatcgtggacacctacacacactacatcctggaaaacaacaaggtcgagatgtttatcaacgacaaagaggacagcgccccactgctgcccgtgatcgaggatgatagatacgtggtcaagacaatccccagctgccggatgagcaccctggaaattccagccatggccttccacatgtttctgttcggcagcaagaaaaccgagaagctgatcgtggacgtgcacaaccggtacaagagactgttccaggccatgcagaaagaagaagtgaccgccgagaatatcgccagcttcggaatcgccgagagcgacctgcctcagaagatcctggatctgatcagcggcaatgcccacggcaaggatgtggacgccttcatcagactgaccgtggacgacatgctgaccgacaccgagcggagaatcaagagattcaaggacgaccggaagtccattcggagcgccgacaacaagatgggaaagagaggcttcaagcagatctccacaggcaagctggccgacttcctggccaaggacatcgtgctgtttcagcccagcgtgaacgatggcgagaacaagatcaccggcctgaactaccggatcatgcagagcgccattgccgtgtacgatagcggcgacgattacgaggccaagcagcagttcaagctgatgttcgagaaggcccggctgatcggcaagggcacaacagagcctcatccatttctgtacaaggtgttcgcccgcagcatccccgccaatgccgtcgagttctacgagcgctacctgatcgagcggaagttctacctgaccggcctgtccaacgagatcaagaaaggcaacagagtggatgtgcccttcatccggcgggaccagaacaagtggaaaacacccgccatgaagaccctgggcagaatctacagcgaggatctgcccgtggaactgcccagacagatgttcgacaatgagatcaagtcccacctgaagtccctgccacagatggaaggcatcgacttcaacaatgccaacgtgacctatctgatcgccgagtacatgaagagagtgctggacgacgacttccagaccttctaccagtggaaccgcaactaccggtacatggacatgcttaagggcgagtacgacagaaagggctccctgcagcactgcttcaccagcgtggaagagagagaaggcctctggaaagagcgggcctccagaacagagcggtacagaaagcaggccagcaacaagatccgcagcaaccggcagatgagaaacgccagcagcgaagagatcgagacaatcctggataagcggctgagcaacagccggaacgagtaccagaaaagcgagaaagtgatccggcgctacagagtgcaggatgccctgctgtttctgctggccaaaaagaccctgaccgaactggccgatttcgacggcgagaggttcaaactgaaagaaatcatgcccgacgccgagaagggaatcctgagcgagatcatgcccatgagcttcaccttcgagaaaggcggcaagaagtacaccatcaccagcgagggcatgaagctgaagaactacggcgacttctttgtgctggctagcgacaagaggatcggcaacctgctggaactcgtgggcagcgacatcgtgtccaaagaggatatcatggaagagttcaacaaatacgaccagtgcaggcccgagatcagctccatcgtgttcaacctggaaaagtgggccttcgacacataccccgagctgtctgccagagtggaccgggaagagaaggtggacttcaagagcatcctgaaaatcctgctgaacaacaagaacatcaacaaagagcagagcgacatcctgcggaagatccggaacgccttcgatgcaaacaattaccccgacaaaggcgtggtggaaatcaaggccctgcctgagatcgccatgagcatcaagaaggcctttggggagtacgccatcatgaagtcgcgaggcggtggaggtagtggagggggaggatcaacgcgtgtgagcaagggcgaggagctgttcaccggggtggtgcccatcctggtcgagctggacggcgacgtaaacggccacaagttcagcgtgtccggcgagggcgagggcgatgccacctacggcaagctgaccctgaagttcatctgcaccaccggcaagctgcccgtgccctggcccaccctcgtgaccaccctgacctacggcgtgcagtgcttcagccgctaccccgaccacatgaagcagcacgacttcttcaagtccgccatgcccgaaggctacgtccaggagcgcaccatcttcttcaaggacgacggcaactacaagacccgcgccgaggtgaagttcgagggcgacaccctggtgaaccgcatcgagctgaagggcatcgacttcaaggaggacggcaacatcctggggcacaagctggagtacaactacaacagccacaacgtctatatcatggccgacaagcagaagaacggcatcaaggtgaacttcaagatccgccacaacatcgaggacggcagcgtgcagctcgccgaccactaccagcagaacacccccatcggcgacggccccgtgctgctgcccgacaaccactacctgagcacccagtccgccctgagcaaagaccccaacgagaagcgcgatcacatggtcctgctggagttcgtgaccgccgccgggatcactctcggcatggacgagctgtacaagtagtaa

SEQ ID NO: 216 - DNA, 4170 bp, Artificial Sequence
  chemically synthesized
atggactacaaagaccatgacggtgattataaagatcatgacatcgattacaaggatgacgatgacaagggcggaatgtacaggatgcaactcctgtcttgcattgcactaagtcttgcacttgtcacgaattccggaggcaacatccccgctctggtggaaaaccagaagaagtactttggcacctacagcgtgatggccatgctgaacgctcagaccgtgctggaccacatccagaaggtggccgatattgagggcgagcagaacgagaacaacgagaatctgtggtttcaccccgtgatgagccacctgtacaacgccaagaacggctacgacaagcagcccgagaaaaccatgttcatcatcgagcggctgcagagctacttcccattcctgaagatcatggccgagaaccagagagagtacagcaacggcaagtacaagcagaaccgcgtggaagtgaacagcaacgacatcttcgaggtgctgaagcgcgccttcggcgtgctgaagatgtacagggacctgaccaacgcatacaagacctacgaggaaaagctgaacgacggctgcgagttcctgaccagcacagagcaacctctgagcggcatgatcaacaactactacacagtggccctgcggaacatgaacgagagatacggctacaagacagaggacctggccttcatccaggacaagcggttcaagttcgtgaaggacgcctacggcaagaaaaagtcccaagtgaataccggattcttcctgagcctgcaggactacaacggcgacacacagaagaagctgcacctgagcggagtgggaatcgccctgctgatctgcctgttcctggacaagcagtacatcaacatctttctgagcaggctgcccatcttctccagctacaatgcccagagcgaggaacggcggatcatcatcagatccttcggcatcaacagcatcaagctgcccaaggaccggatccacagcgagaagtccaacaagagcgtggccatggatatgctcaacgaagtgaagcggtgccccgacgagctgttcacaacactgtctgccgagaagcagtcccggttcagaatcatcagcgacgaccacaatgaagtgctgatgaagcggagcagcgacagattcgtgcctctgctgctgcagtatatcgattacggcaagctgttcgaccacatcaggttccacgtgaacatgggcaagctgagatacctgctgaaggccgacaagacctgcatcgacggccagaccagagtcagagtgatcgagcagcccctgaacggcttcggcagactggaagaggccgagacaatgcggaagcaagagaacggcaccttcggcaacagcggcatccggatcagagacttcgagaacatgaagcgggacgacgccaatcctgccaactatccctacatcgtggacacctacacacactacatcctggaaaacaacaaggtcgagatgtttatcaacgacaaagaggacagcgccccactgctgcccgtgatcgaggatgatagatacgtggtcaagacaatccccagctgccggatgagcaccctggaaattccagccatggccttccacatgtttctgttcggcagcaagaaaaccgagaagctgatcgtggacgtgcacaaccggtacaagagactgttccaggccatgcagaaagaagaagtgaccgccgagaatatcgccagcttcggaatcgccgagagcgacctgcctcagaagatcctggatctgatcagcggcaatgcccacggcaaggatgtggacgccttcatcagactgaccgtggacgacatgctgaccgacaccgagcggagaatcaagagattcaaggacgaccggaagtccattcggagcgccgacaacaagatgggaaagagaggcttcaagcagatctccacaggcaagctggccgacttcctggccaaggacatcgtgctgtttcagcccagcgtgaacgatggcgagaacaagatcaccggcctgaactaccggatcatgcagagcgccattgccgtgtacgatagcggcgacgattacgaggccaagcagcagttcaagctgatgttcgagaaggcccggctgatcggcaagggcacaacagagcctcatccatttctgtacaaggtgttcgcccgcagcatccccgccaatgccgtcgagttctacgagcgctacctgatcgagcggaagttctacctgaccggcctgtccaacgagatcaagaaaggcaacagagtggatgtgcccttcatccggcgggaccagaacaagtggaaaacacccgccatgaagaccctgggcagaatctacagcgaggatctgcccgtggaactgcccagacagatgttcgacaatgagatcaagtcccacctgaagtccctgccacagatggaaggcatcgacttcaacaatgccaacgtgacctatctgatcgccgagtacatgaagagagtgctggacgacgacttccagaccttctaccagtggaaccgcaactaccggtacatggacatgcttaagggcgagtacgacagaaagggctccctgcagcactgcttcaccagcgtggaagagagagaaggcctctggaaagagcgggcctccagaacagagcggtacagaaagcaggccagcaacaagatccgcagcaaccggcagatgagaaacgccagcagcgaagagatcgagacaatcctggataagcggctgagcaacagccggaacgagtaccagaaaagcgagaaagtgatccggcgctacagagtgcaggatgccctgctgtttctgctggccaaaaagaccctgaccgaactggccgatttcgacggcgagaggttcaaactgaaagaaatcatgcccgacgccgagaagggaatcctgagcgagatcatgcccatgagcttcaccttcgagaaaggcggcaagaagtacaccatcaccagcgagggcatgaagctgaagaactacggcgacttctttgtgctggctagcgacaagaggatcggcaacctgctggaactcgtgggcagcgacatcgtgtccaaagaggatatcatggaagagttcaacaaatacgaccagtgcaggcccgagatcagctccatcgtgttcaacctggaaaagtgggccttcgacacataccccgagctgtctgccagagtggaccgggaagagaaggtggacttcaagagcatcctgaaaatcctgctgaacaacaagaacatcaacaaagagcagagcgacatcctgcggaagatccggaacgccttcgatgcaaacaattaccccgacaaaggcgtggtggaaatcaaggccctgcctgagatcgccatgagcatcaagaaggcctttggggagtacgccatcatgaagtcgcgaggcggtggaggtagtggagggggaggatcaacgcgtgtgagcaagggcgaggagctgttcaccggggtggtgcccatcctggtcgagctggacggcgacgtaaacggccacaagttcagcgtgtccggcgagggcgagggcgatgccacctacggcaagctgaccctgaagttcatctgcaccaccggcaagctgcccgtgccctggcccaccctcgtgaccaccctgacctacggcgtgcagtgcttcagccgctaccccgaccacatgaagcagcacgacttcttcaagtccgccatgcccgaaggctacgtccaggagcgcaccatcttcttcaaggacgacggcaactacaagacccgcgccgaggtgaagttcgagggcgacaccctggtgaaccgcatcgagctgaagggcatcgacttcaaggaggacggcaacatcctggggcacaagctggagtacaactacaacagccacaacgtctatatcatggccgacaagcagaagaacggcatcaaggtgaacttcaagatccgccacaacatcgaggacggcagcgtgcagctcgccgaccactaccagcagaacacccccatcggcgacggccccgtgctgctgcccgacaaccactacctgagcacccagtccgccctgagcaaagaccccaacgagaagcgcgatcacatggtcctgctggagttcgtgaccgccgccgggatcactctcggcatggacgagctgtacaagtagtaa

SEQ ID NO: 217 - DNA, 4239 bp, Artificial Sequence
  chemically synthesized
atggactacaaagaccatgacggtgattataaagatcatgacatcgattacaaggatgacgatgacaagggcggaatgggttgttgtttcagcaagacagcggcgaaaggtgaagcagcagcagaaagaccaggcgaggctgcggtagcatcaagtccctccaaggctaatgggcaggaaaacggacacgtcaaagttggaagcggaggcaacatccccgctctggtggaaaaccagaagaagtactttggcacctacagcgtgatggccatgctgaacgctcagaccgtgctggaccacatccagaaggtggccgatattgagggcgagcagaacgagaacaacgagaatctgtggtttcaccccgtgatgagccacctgtacaacgccaagaacggctacgacaagcagcccgagaaaaccatgttcatcatcgagcggctgcagagctacttcccattcctgaagatcatggccgagaaccagagagagtacagcaacggcaagtacaagcagaaccgcgtggaagtgaacagcaacgacatcttcgaggtgctgaagcgcgccttcggcgtgctgaagatgtacagggacctgaccaacgcatacaagacctacgaggaaaagctgaacgacggctgcgagttcctgaccagcacagagcaacctctgagcggcatgatcaacaactactacacagtggccctgcggaacatgaacgagagatacggctacaagacagaggacctggccttcatccaggacaagcggttcaagttcgtgaaggacgcctacggcaagaaaaagtcccaagtgaataccggattcttcctgagcctgcaggactacaacggcgacacacagaagaagctgcacctgagcggagtgggaatcgccctgctgatctgcctgttcctggacaagcagtacatcaacatctttctgagcaggctgcccatcttctccagctacaatgcccagagcgaggaacggcggatcatcatcagatccttcggcatcaacagcatcaagctgcccaaggaccggatccacagcgagaagtccaacaagagcgtggccatggatatgctcaacgaagtgaagcggtgccccgacgagctgttcacaacactgtctgccgagaagcagtcccggttcagaatcatcagcgacgaccacaatgaagtgctgatgaagcggagcagcgacagattcgtgcctctgctgctgcagtatatcgattacggcaagctgttcgaccacatcaggttccacgtgaacatgggcaagctgagatacctgctgaaggccgacaagacctgcatcgacggccagaccagagtcagagtgatcgagcagcccctgaacggcttcggcagactggaagaggccgagacaatgcggaagcaagagaacggcaccttcggcaacagcggcatccggatcagagacttcgagaacatgaagcgggacgacgccaatcctgccaactatccctacatcgtggacacctacacacactacatcctggaaaacaacaaggtcgagatgtttatcaacgacaaagaggacagcgccccactgctgcccgtgatcgaggatgatagatacgtggtcaagacaatccccagctgccggatgagcaccctggaaattccagccatggccttccacatgtttctgttcggcagcaagaaaaccgagaagctgatcgtggacgtgcacaaccggtacaagagactgttccaggccatgcagaaagaagaagtgaccgccgagaatatcgccagcttcggaatcgccgagagcgacctgcctcagaagatcctggatctgatcagcggcaatgcccacggcaaggatgtggacgccttcatcagactgaccgtggacgacatgctgaccgacaccgagcggagaatcaagagattcaaggacgaccggaagtccattcggagcgccgacaacaagatgggaaagagaggcttcaagcagatctccacaggcaagctggccgacttcctggccaaggacatcgtgctgtttcagcccagcgtgaacgatggcgagaacaagatcaccggcctgaactaccggatcatgcagagcgccattgccgtgtacgatagcggcgacgattacgaggccaagcagcagttcaagctgatgttcgagaaggcccggctgatcggcaagggcacaacagagcctcatccatttctgtacaaggtgttcgcccgcagcatccccgccaatgccgtcgagttctacgagcgctacctgatcgagcggaagttctacctgaccggcctgtccaacgagatcaagaaaggcaacagagtggatgtgcccttcatccggcgggaccagaacaagtggaaaacacccgccatgaagaccctgggcagaatctacagcgaggatctgcccgtggaactgcccagacagatgttcgacaatgagatcaagtcccacctgaagtccctgccacagatggaaggcatcgacttcaacaatgccaacgtgacctatctgatcgccgagtacatgaagagagtgctggacgacgacttccagaccttctaccagtggaaccgcaactaccggtacatggacatgcttaagggcgagtacgacagaaagggctccctgcagcactgcttcaccagcgtggaagagagagaaggcctctggaaagagcgggcctccagaacagagcggtacagaaagcaggccagcaacaagatccgcagcaaccggcagatgagaaacgccagcagcgaagagatcgagacaatcctggataagcggctgagcaacagccggaacgagtaccagaaaagcgagaaagtgatccggcgctacagagtgcaggatgccctgctgtttctgctggccaaaaagaccctgaccgaactggccgatttcgacggcgagaggttcaaactgaaagaaatcatgcccgacgccgagaagggaatcctgagcgagatcatgcccatgagcttcaccttcgagaaaggcggcaagaagtacaccatcaccagcgagggcatgaagctgaagaactacggcgacttctttgtgctggctagcgacaagaggatcggcaacctgctggaactcgtgggcagcgacatcgtgtccaaagaggatatcatggaagagttcaacaaatacgaccagtgcaggcccgagatcagctccatcgtgttcaacctggaaaagtgggccttcgacacataccccgagctgtctgccagagtggaccgggaagagaaggtggacttcaagagcatcctgaaaatcctgctgaacaacaagaacatcaacaaagagcagagcgacatcctgcggaagatccggaacgccttcgatgcaaacaattaccccgacaaaggcgtggtggaaatcaaggccctgcctgagatcgccatgagcatcaagaaggcctttggggagtacgccatcatgaagtcgcgaggcggtggaggtagtggagggggaggatcaacgcgtgtgagcaagggcgaggagctgttcaccggggtggtgcccatcctggtcgagctggacggcgacgtaaacggccacaagttcagcgtgtccggcgagggcgagggcgatgccacctacggcaagctgaccctgaagttcatctgcaccaccggcaagctgcccgtgccctggcccaccctcgtgaccaccctgacctacggcgtgcagtgcttcagccgctaccccgaccacatgaagcagcacgacttcttcaagtccgccatgcccgaaggctacgtccaggagcgcaccatcttcttcaaggacgacggcaactacaagacccgcgccgaggtgaagttcgagggcgacaccctggtgaaccgcatcgagctgaagggcatcgacttcaaggaggacggcaacatcctggggcacaagctggagtacaactacaacagccacaacgtctatatcatggccgacaagcagaagaacggcatcaaggtgaacttcaagatccgccacaacatcgaggacggcagcgtgcagctcgccgaccactaccagcagaacacccccatcggcgacggccccgtgctgctgcccgacaaccactacctgagcacccagtccgccctgagcaaagaccccaacgagaagcgcgatcacatggtcctgctggagttcgtgaccgccgccgggatcactctcggcatggacgagctgtacaagtagtaa

SEQ ID NO: 218 - DNA, 4161 bp, Artificial Sequence
  chemically synthesized
atggactacaaagaccatgacggtgattataaagatcatgacatcgattacaaggatgacgatgacaagggcggaatgctgctgcccgtccccctgctgctgggcctgctgggcgccgccgccgacggaggcaacatccccgctctggtggaaaaccagaagaagtactttggcacctacagcgtgatggccatgctgaacgctcagaccgtgctggaccacatccagaaggtggccgatattgagggcgagcagaacgagaacaacgagaatctgtggtttcaccccgtgatgagccacctgtacaacgccaagaacggctacgacaagcagcccgagaaaaccatgttcatcatcgagcggctgcagagctacttcccattcctgaagatcatggccgagaaccagagagagtacagcaacggcaagtacaagcagaaccgcgtggaagtgaacagcaacgacatcttcgaggtgctgaagcgcgccttcggcgtgctgaagatgtacagggacctgaccaacgcatacaagacctacgaggaaaagctgaacgacggctgcgagttcctgaccagcacagagcaacctctgagcggcatgatcaacaactactacacagtggccctgcggaacatgaacgagagatacggctacaagacagaggacctggccttcatccaggacaagcggttcaagttcgtgaaggacgcctacggcaagaaaaagtcccaagtgaataccggattcttcctgagcctgcaggactacaacggcgacacacagaagaagctgcacctgagcggagtgggaatcgccctgctgatctgcctgttcctggacaagcagtacatcaacatctttctgagcaggctgcccatcttctccagctacaatgcccagagcgaggaacggcggatcatcatcagatccttcggcatcaacagcatcaagctgcccaaggaccggatccacagcgagaagtccaacaagagcgtggccatggatatgctcaacgaagtgaagcggtgccccgacgagctgttcacaacactgtctgccgagaagcagtcccggttcagaatcatcagcgacgaccacaatgaagtgctgatgaagcggagcagcgacagattcgtgcctctgctgctgcagtatatcgattacggcaagctgttcgaccacatcaggttccacgtgaacatgggcaagctgagatacctgctgaaggccgacaagacctgcatcgacggccagaccagagtcagagtgatcgagcagcccctgaacggcttcggcagactggaagaggccgagacaatgcggaagcaagagaacggcaccttcggcaacagcggcatccggatcagagacttcgagaacatgaagcgggacgacgccaatcctgccaactatccctacatcgtggacacctacacacactacatcctggaaaacaacaaggtcgagatgtttatcaacgacaaagaggacagcgccccactgctgcccgtgatcgaggatgatagatacgtggtcaagacaatccccagctgccggatgagcaccctggaaattccagccatggccttccacatgtttctgttcggcagcaagaaaaccgagaagctgatcgtggacgtgcacaaccggtacaagagactgttccaggccatgcagaaagaagaagtgaccgccgagaatatcgccagcttcggaatcgccgagagcgacctgcctcagaagatcctggatctgatcagcggcaatgcccacggcaaggatgtggacgccttcatcagactgaccgtggacgacatgctgaccgacaccgagcggagaatcaagagattcaaggacgaccggaagtccattcggagcgccgacaacaagatgggaaagagaggcttcaagcagatctccacaggcaagctggccgacttcctggccaaggacatcgtgctgtttcagcccagcgtgaacgatggcgagaacaagatcaccggcctgaactaccggatcatgcagagcgccattgccgtgtacgatagcggcgacgattacgaggccaagcagcagttcaagctgatgttcgagaaggcccggctgatcggcaagggcacaacagagcctcatccatttctgtacaaggtgttcgcccgcagcatccccgccaatgccgtcgagttctacgagcgctacctgatcgagcggaagttctacctgaccggcctgtccaacgagatcaagaaaggcaacagagtggatgtgcccttcatccggcgggaccagaacaagtggaaaacacccgccatgaagaccctgggcagaatctacagcgaggatctgcccgtggaactgcccagacagatgttcgacaatgagatcaagtcccacctgaagtccctgccacagatggaaggcatcgacttcaacaatgccaacgtgacctatctgatcgccgagtacatgaagagagtgctggacgacgacttccagaccttctaccagtggaaccgcaactaccggtacatggacatgcttaagggcgagtacgacagaaagggctccctgcagcactgcttcaccagcgtggaagagagagaaggcctctggaaagagcgggcctccagaacagagcggtacagaaagcaggccagcaacaagatccgcagcaaccggcagatgagaaacgccagcagcgaagagatcgagacaatcctggataagcggctgagcaacagccggaacgagtaccagaaaagcgagaaagtgatccggcgctacagagtgcaggatgccctgctgtttctgctggccaaaaagaccctgaccgaactggccgatttcgacggcgagaggttcaaactgaaagaaatcatgcccgacgccgagaagggaatcctgagcgagatcatgcccatgagcttcaccttcgagaaaggcggcaagaagtacaccatcaccagcgagggcatgaagctgaagaactacggcgacttctttgtgctggctagcgacaagaggatcggcaacctgctggaactcgtgggcagcgacatcgtgtccaaagaggatatcatggaagagttcaacaaatacgaccagtgcaggcccgagatcagctccatcgtgttcaacctggaaaagtgggccttcgacacataccccgagctgtctgccagagtggaccgggaagagaaggtggacttcaagagcatcctgaaaatcctgctgaacaacaagaacatcaacaaagagcagagcgacatcctgcggaagatccggaacgccttcgatgcaaacaattaccccgacaaaggcgtggtggaaatcaaggccctgcctgagatcgccatgagcatcaagaaggcctttggggagtacgccatcatgaagtcgcgaggcggtggaggtagtggagggggaggatcaacgcgtgtgagcaagggcgaggagctgttcaccggggtggtgcccatcctggtcgagctggacggcgacgtaaacggccacaagttcagcgtgtccggcgagggcgagggcgatgccacctacggcaagctgaccctgaagttcatctgcaccaccggcaagctgcccgtgccctggcccaccctcgtgaccaccctgacctacggcgtgcagtgcttcagccgctaccccgaccacatgaagcagcacgacttcttcaagtccgccatgcccgaaggctacgtccaggagcgcaccatcttcttcaaggacgacggcaactacaagacccgcgccgaggtgaagttcgagggcgacaccctggtgaaccgcatcgagctgaagggcatcgacttcaaggaggacggcaacatcctggggcacaagctggagtacaactacaacagccacaacgtctatatcatggccgacaagcagaagaacggcatcaaggtgaacttcaagatccgccacaacatcgaggacggcagcgtgcagctcgccgaccactaccagcagaacacccccatcggcgacggccccgtgctgctgcccgacaaccactacctgagcacccagtccgccctgagcaaagaccccaacgagaagcgcgatcacatggtcctgctggagttcgtgaccgccgccgggatcactctcggcatggacgagctgtacaagtagtaa

SEQ ID NO: 219 - DNA, 4140 bp, Artificial Sequence
  chemically synthesized
atggactacaaagaccatgacggtgattataaagatcatgacatcgattacaaggatgacgatgacaagggcggagggatcactctcggcaaggacgagctgtaaggaggcaacatccccgctctggtggaaaaccagaagaagtactttggcacctacagcgtgatggccatgctgaacgctcagaccgtgctggaccacatccagaaggtggccgatattgagggcgagcagaacgagaacaacgagaatctgtggtttcaccccgtgatgagccacctgtacaacgccaagaacggctacgacaagcagcccgagaaaaccatgttcatcatcgagcggctgcagagctacttcccattcctgaagatcatggccgagaaccagagagagtacagcaacggcaagtacaagcagaaccgcgtggaagtgaacagcaacgacatcttcgaggtgctgaagcgcgccttcggcgtgctgaagatgtacagggacctgaccaacgcatacaagacctacgaggaaaagctgaacgacggctgcgagttcctgaccagcacagagcaacctctgagcggcatgatcaacaactactacacagtggccctgcggaacatgaacgagagatacggctacaagacagaggacctggccttcatccaggacaagcggttcaagttcgtgaaggacgcctacggcaagaaaaagtcccaagtgaataccggattcttcctgagcctgcaggactacaacggcgacacacagaagaagctgcacctgagcggagtgggaatcgccctgctgatctgcctgttcctggacaagcagtacatcaacatctttctgagcaggctgcccatcttctccagctacaatgcccagagcgaggaacggcggatcatcatcagatccttcggcatcaacagcatcaagctgcccaaggaccggatccacagcgagaagtccaacaagagcgtggccatggatatgctcaacgaagtgaagcggtgccccgacgagctgttcacaacactgtctgccgagaagcagtcccggttcagaatcatcagcgacgaccacaatgaagtgctgatgaagcggagcagcgacagattcgtgcctctgctgctgcagtatatcgattacggcaagctgttcgaccacatcaggttccacgtgaacatgggcaagctgagatacctgctgaaggccgacaagacctgcatcgacggccagaccagagtcagagtgatcgagcagcccctgaacggcttcggcagactggaagaggccgagacaatgcggaagcaagagaacggcaccttcggcaacagcggcatccggatcagagacttcgagaacatgaagcgggacgacgccaatcctgccaactatccctacatcgtggacacctacacacactacatcctggaaaacaacaaggtcgagatgtttatcaacgacaaagaggacagcgccccactgctgcccgtgatcgaggatgatagatacgtggtcaagacaatccccagctgccggatgagcaccctggaaattccagccatggccttccacatgtttctgttcggcagcaagaaaaccgagaagctgatcgtggacgtgcacaaccggtacaagagactgttccaggccatgcagaaagaagaagtgaccgccgagaatatcgccagcttcggaatcgccgagagcgacctgcctcagaagatcctggatctgatcagcggcaatgcccacggcaaggatgtggacgccttcatcagactgaccgtggacgacatgctgaccgacaccgagcggagaatcaagagattcaaggacgaccggaagtccattcggagcgccgacaacaagatgggaaagagaggcttcaagcagatctccacaggcaagctggccgacttcctggccaaggacatcgtgctgtttcagcccagcgtgaacgatggcgagaacaagatcaccggcctgaactaccggatcatgcagagcgccattgccgtgtacgatagcggcgacgattacgaggccaagcagcagttcaagctgatgttcgagaaggcccggctgatcggcaagggcacaacagagcctcatccatttctgtacaaggtgttcgcccgcagcatccccgccaatgccgtcgagttctacgagcgctacctgatcgagcggaagttctacctgaccggcctgtccaacgagatcaagaaaggcaacagagtggatgtgcccttcatccggcgggaccagaacaagtggaaaacacccgccatgaagaccctgggcagaatctacagcgaggatctgcccgtggaactgcccagacagatgttcgacaatgagatcaagtcccacctgaagtccctgccacagatggaaggcatcgacttcaacaatgccaacgtgacctatctgatcgccgagtacatgaagagagtgctggacgacgacttccagaccttctaccagtggaaccgcaactaccggtacatggacatgcttaagggcgagtacgacagaaagggctccctgcagcactgcttcaccagcgtggaagagagagaaggcctctggaaagagcgggcctccagaacagagcggtacagaaagcaggccagcaacaagatccgcagcaaccggcagatgagaaacgccagcagcgaagagatcgagacaatcctggataagcggctgagcaacagccggaacgagtaccagaaaagcgagaaagtgatccggcgctacagagtgcaggatgccctgctgtttctgctggccaaaaagaccctgaccgaactggccgatttcgacggcgagaggttcaaactgaaagaaatcatgcccgacgccgagaagggaatcctgagcgagatcatgcccatgagcttcaccttcgagaaaggcggcaagaagtacaccatcaccagcgagggcatgaagctgaagaactacggcgacttctttgtgctggctagcgacaagaggatcggcaacctgctggaactcgtgggcagcgacatcgtgtccaaagaggatatcatggaagagttcaacaaatacgaccagtgcaggcccgagatcagctccatcgtgttcaacctggaaaagtgggccttcgacacataccccgagctgtctgccagagtggaccgggaagagaaggtggacttcaagagcatcctgaaaatcctgctgaacaacaagaacatcaacaaagagcagagcgacatcctgcggaagatccggaacgccttcgatgcaaacaattaccccgacaaaggcgtggtggaaatcaaggccctgcctgagatcgccatgagcatcaagaaggcctttggggagtacgccatcatgaagtcgcgaggcggtggaggtagtggagggggaggatcaacgcgtgtgagcaagggcgaggagctgttcaccggggtggtgcccatcctggtcgagctggacggcgacgtaaacggccacaagttcagcgtgtccggcgagggcgagggcgatgccacctacggcaagctgaccctgaagttcatctgcaccaccggcaagctgcccgtgccctggcccaccctcgtgaccaccctgacctacggcgtgcagtgcttcagccgctaccccgaccacatgaagcagcacgacttcttcaagtccgccatgcccgaaggctacgtccaggagcgcaccatcttcttcaaggacgacggcaactacaagacccgcgccgaggtgaagttcgagggcgacaccctggtgaaccgcatcgagctgaagggcatcgacttcaaggaggacggcaacatcctggggcacaagctggagtacaactacaacagccacaacgtctatatcatggccgacaagcagaagaacggcatcaaggtgaacttcaagatccgccacaacatcgaggacggcagcgtgcagctcgccgaccactaccagcagaacacccccatcggcgacggccccgtgctgctgcccgacaaccactacctgagcacccagtccgccctgagcaaagaccccaacgagaagcgcgatcacatggtcctgctggagttcgtgaccgccgccgggatcactctcggcatggacgagctgtacaagtagtaa

SEQ ID NO: 220 - DNA, 4122 bp, Artificial Sequence
  chemically synthesized
atggactacaaagaccatgacggtgattataaagatcatgacatcgattacaaggatgacgatgacaagggcggatccaaattataaggaggcaacatccccgctctggtggaaaaccagaagaagtactttggcacctacagcgtgatggccatgctgaacgctcagaccgtgctggaccacatccagaaggtggccgatattgagggcgagcagaacgagaacaacgagaatctgtggtttcaccccgtgatgagccacctgtacaacgccaagaacggctacgacaagcagcccgagaaaaccatgttcatcatcgagcggctgcagagctacttcccattcctgaagatcatggccgagaaccagagagagtacagcaacggcaagtacaagcagaaccgcgtggaagtgaacagcaacgacatcttcgaggtgctgaagcgcgccttcggcgtgctgaagatgtacagggacctgaccaacgcatacaagacctacgaggaaaagctgaacgacggctgcgagttcctgaccagcacagagcaacctctgagcggcatgatcaacaactactacacagtggccctgcggaacatgaacgagagatacggctacaagacagaggacctggccttcatccaggacaagcggttcaagttcgtgaaggacgcctacggcaagaaaaagtcccaagtgaataccggattcttcctgagcctgcaggactacaacggcgacacacagaagaagctgcacctgagcggagtgggaatcgccctgctgatctgcctgttcctggacaagcagtacatcaacatctttctgagcaggctgcccatcttctccagctacaatgcccagagcgaggaacggcggatcatcatcagatccttcggcatcaacagcatcaagctgcccaaggaccggatccacagcgagaagtccaacaagagcgtggccatggatatgctcaacgaagtgaagcggtgccccgacgagctgttcacaacactgtctgccgagaagcagtcccggttcagaatcatcagcgacgaccacaatgaagtgctgatgaagcggagcagcgacagattcgtgcctctgctgctgcagtatatcgattacggcaagctgttcgaccacatcaggttccacgtgaacatgggcaagctgagatacctgctgaaggccgacaagacctgcatcgacggccagaccagagtcagagtgatcgagcagcccctgaacggcttcggcagactggaagaggccgagacaatgcggaagcaagagaacggcaccttcggcaacagcggcatccggatcagagacttcgagaacatgaagcgggacgacgccaatcctgccaactatccctacatcgtggacacctacacacactacatcctggaaaacaacaaggtcgagatgtttatcaacgacaaagaggacagcgccccactgctgcccgtgatcgaggatgatagatacgtggtcaagacaatccccagctgccggatgagcaccctggaaattccagccatggccttccacatgtttctgttcggcagcaagaaaaccgagaagctgatcgtggacgtgcacaaccggtacaagagactgttccaggccatgcagaaagaagaagtgaccgccgagaatatcgccagcttcggaatcgccgagagcgacctgcctcagaagatcctggatctgatcagcggcaatgcccacggcaaggatgtggacgccttcatcagactgaccgtggacgacatgctgaccgacaccgagcggagaatcaagagattcaaggacgaccggaagtccattcggagcgccgacaacaagatgggaaagagaggcttcaagcagatctccacaggcaagctggccgacttcctggccaaggacatcgtgctgtttcagcccagcgtgaacgatggcgagaacaagatcaccggcctgaactaccggatcatgcagagcgccattgccgtgtacgatagcggcgacgattacgaggccaagcagcagttcaagctgatgttcgagaaggcccggctgatcggcaagggcacaacagagcctcatccatttctgtacaaggtgttcgcccgcagcatccccgccaatgccgtcgagttctacgagcgctacctgatcgagcggaagttctacctgaccggcctgtccaacgagatcaagaaaggcaacagagtggatgtgcccttcatccggcgggaccagaacaagtggaaaacacccgccatgaagaccctgggcagaatctacagcgaggatctgcccgtggaactgcccagacagatgttcgacaatgagatcaagtcccacctgaagtccctgccacagatggaaggcatcgacttcaacaatgccaacgtgacctatctgatcgccgagtacatgaagagagtgctggacgacgacttccagaccttctaccagtggaaccgcaactaccggtacatggacatgcttaagggcgagtacgacagaaagggctccctgcagcactgcttcaccagcgtggaagagagagaaggcctctggaaagagcgggcctccagaacagagcggtacagaaagcaggccagcaacaagatccgcagcaaccggcagatgagaaacgccagcagcgaagagatcgagacaatcctggataagcggctgagcaacagccggaacgagtaccagaaaagcgagaaagtgatccggcgctacagagtgcaggatgccctgctgtttctgctggccaaaaagaccctgaccgaactggccgatttcgacggcgagaggttcaaactgaaagaaatcatgcccgacgccgagaagggaatcctgagcgagatcatgcccatgagcttcaccttcgagaaaggcggcaagaagtacaccatcaccagcgagggcatgaagctgaagaactacggcgacttctttgtgctggctagcgacaagaggatcggcaacctgctggaactcgtgggcagcgacatcgtgtccaaagaggatatcatggaagagttcaacaaatacgaccagtgcaggcccgagatcagctccatcgtgttcaacctggaaaagtgggccttcgacacataccccgagctgtctgccagagtggaccgggaagagaaggtggacttcaagagcatcctgaaaatcctgctgaacaacaagaacatcaacaaagagcagagcgacatcctgcggaagatccggaacgccttcgatgcaaacaattaccccgacaaaggcgtggtggaaatcaaggccctgcctgagatcgccatgagcatcaagaaggcctttggggagtacgccatcatgaagtcgcgaggcggtggaggtagtggagggggaggatcaacgcgtgtgagcaagggcgaggagctgttcaccggggtggtgcccatcctggtcgagctggacggcgacgtaaacggccacaagttcagcgtgtccggcgagggcgagggcgatgccacctacggcaagctgaccctgaagttcatctgcaccaccggcaagctgcccgtgccctggcccaccctcgtgaccaccctgacctacggcgtgcagtgcttcagccgctaccccgaccacatgaagcagcacgacttcttcaagtccgccatgcccgaaggctacgtccaggagcgcaccatcttcttcaaggacgacggcaactacaagacccgcgccgaggtgaagttcgagggcgacaccctggtgaaccgcatcgagctgaagggcatcgacttcaaggaggacggcaacatcctggggcacaagctggagtacaactacaacagccacaacgtctatatcatggccgacaagcagaagaacggcatcaaggtgaacttcaagatccgccacaacatcgaggacggcagcgtgcagctcgccgaccactaccagcagaacacccccatcggcgacggccccgtgctgctgcccgacaaccactacctgagcacccagtccgccctgagcaaagaccccaacgagaagcgcgatcacatggtcctgctggagttcgtgaccgccgccgggatcactctcggcatggacgagctgtacaagtagtaa

SEQ ID NO: 221 - DNA, 3906 bp, Artificial Sequence
  chemically synthesized
atggactacaaagaccatgacggtgattataaagatcatgacatcgattacaaggatgacgatgacaagggcggaaactcaaagaaaaggtcactggaggacaacgaaacggaaatcaaagtctccagagacacctggaacactaagaacatgcggtccctggaaccgccacgaagcaagaaacggatacatggaggcaacatccccgctctggtggaaaaccagaagaagtactttggcacctacagcgtgatggccatgctgaacgctcagaccgtgctggaccacatccagaaggtggccgatattgagggcgagcagaacgagaacaacgagaatctgtggtttcaccccgtgatgagccacctgtacaacgccaagaacggctacgacaagcagcccgagaaaaccatgttcatcatcgagcggctgcagagctacttcccattcctgaagatcatggccgagaaccagagagagtacagcaacggcaagtacaagcagaaccgcgtggaagtgaacagcaacgacatcttcgaggtgctgaagcgcgccttcggcgtgctgaagatgtacagggacctgaccaacgcatacaagacctacgaggaaaagctgaacgacggctgcgagttcctgaccagcacagagcaacctctgagcggcatgatcaacaactactacacagtggccctgcggaacatgaacgagagatacggctacaagacagaggacctggccttcatccaggacaagcggttcaagttcgtgaaggacgcctacggcaagaaaaagtcccaagtgaataccggattcttcctgagcctgcaggactacaacggcgacacacagaagaagctgcacctgagcggagtgggaatcgccctgctgatctgcctgttcctggacaagcagtacatcaacatctttctgagcaggctgcccatcttctccagctacaatgcccagagcgaggaacggcggatcatcatcagatccttcggcatcaacagcatcaagctgcccaaggaccggatccacagcgagaagtccaacaagagcgtggccatggatatgctcaacgaagtgaagcggtgccccgacgagctgttcacaacactgtctgccgagaagcagtcccggttcagaatcatcagcgacgaccacaatgaagtgctgatgaagcggagcagcgacagattcgtgcctctgctgctgcagtatatcgattacggcaagctgttcgaccacatcaggttccacgtgaacatgggcaagctgagatacctgctgaaggccgacaagacctgcatcgacggccagaccagagtcagagtgatcgagcagcccctgaacggcttcggcagactggaagaggccgagacaatgcggaagcaagagaacggcaccttcggcaacagcggcatccggatcagagacttcgagaacatgaagcgggacgacgccaatcctgccaactatccctacatcgtggacacctacacacactacatcctggaaaacaacaaggtcgagatgtttatcaacgacaaagaggacagcgccccactgctgcccgtgatcgaggatgatagatacgtggtcaagacaatccccagctgccggatgagcaccctggaaattccagccatggccttccacatgtttctgttcggcagcaagaaaaccgagaagctgatcgtggacgtgcacaaccggtacaagagactgttccaggccatgcagaaagaagaagtgaccgccgagaatatcgccagcttcggaatcgccgagagcgacctgcctcagaagatcctggatctgatcagcggcaatgcccacggcaaggatgtggacgccttcatcagactgaccgtggacgacatgctgaccgacaccgagcggagaatcaagagattcaaggacgaccggaagtccattcggagcgccgacaacaagatgggaaagagaggcttcaagcagatctccacaggcaagctggccgacttcctggccaaggacatcgtgctgtttcagcccagcgtgaacgatggcgagaacaagatcaccggcctgaactaccggatcatgcagagcgccattgccgtgtacgatagcggcgacgattacgaggccaagcagcagttcaagctgatgttcgagaaggcccggctgatcggcaagggcacaacagagcctcatccatttctgtacaaggtgttcgcccgcagcatccccgccaatgccgtcgagttctacgagcgctacctgatcgagcggaagttctacctgaccggcctgtccaacgagatcaagaaaggcaacagagtggatgtgcccttcatccggcgggaccagaacaagtggaaaacacccgccatgaagaccctgggcagaatctacagcgaggatctgcccgtggaactgcccagacagatgttcgacaatgagatcaagtcccacctgaagtccctgccacagatggaaggcatcgacttcaacaatgccaacgtgacctatctgatcgccgagtacatgaagagagtgctggacgacgacttccagaccttctaccagtggaaccgcaactaccggtacatggacatgcttaagggcgagtacgacagaaagggctccctgcagcactgcttcaccagcgtggaagagagagaaggcctctggaaagagcgggcctccagaacagagcggtacagaaagcaggccagcaacaagatccgcagcaaccggcagatgagaaacgccagcagcgaagagatcgagacaatcctggataagcggctgagcaacagccggaacgagtaccagaaaagcgagaaagtgatccggcgctacagagtgcaggatgccctgctgtttctgctggccaaaaagaccctgaccgaactggccgatttcgacggcgagaggttcaaactgaaagaaatcatgcccgacgccgagaagggaatcctgagcgagatcatgcccatgagcttcaccttcgagaaaggcggcaagaagtacaccatcaccagcgagggcatgaagctgaagaactacggcgacttctttgtgctggctagcgacaagaggatcggcaacctgctggaactcgtgggcagcgacatcgtgtccaaagaggattcgcgaggcggtggaggtagtggagggggaggatcaacgcgtgtgagcaagggcgaggagctgttcaccggggtggtgcccatcctggtcgagctggacggcgacgtaaacggccacaagttcagcgtgtccggcgagggcgagggcgatgccacctacggcaagctgaccctgaagttcatctgcaccaccggcaagctgcccgtgccctggcccaccctcgtgaccaccctgacctacggcgtgcagtgcttcagccgctaccccgaccacatgaagcagcacgacttcttcaagtccgccatgcccgaaggctacgtccaggagcgcaccatcttcttcaaggacgacggcaactacaagacccgcgccgaggtgaagttcgagggcgacaccctggtgaaccgcatcgagctgaagggcatcgacttcaaggaggacggcaacatcctggggcacaagctggagtacaactacaacagccacaacgtctatatcatggccgacaagcagaagaacggcatcaaggtgaacttcaagatccgccacaacatcgaggacggcagcgtgcagctcgccgaccactaccagcagaacacccccatcggcgacggccccgtgctgctgcccgacaaccactacctgagcacccagtccgccctgagcaaagaccccaacgagaagcgcgatcacatggtcctgctggagttcgtgaccgccgccgggatcactctcggcatggacgagctgtacaagtagtaa

SEQ ID NO: 222 - DNA, 3822 bp, Artificial Sequence
  chemically synthesized
atggactacaaagaccatgacggtgattataaagatcatgacatcgattacaaggatgacgatgacaagggcggacttcaactgcctccacttgaaagactgacactgggaggcaacatccccgctctggtggaaaaccagaagaagtactttggcacctacagcgtgatggccatgctgaacgctcagaccgtgctggaccacatccagaaggtggccgatattgagggcgagcagaacgagaacaacgagaatctgtggtttcaccccgtgatgagccacctgtacaacgccaagaacggctacgacaagcagcccgagaaaaccatgttcatcatcgagcggctgcagagctacttcccattcctgaagatcatggccgagaaccagagagagtacagcaacggcaagtacaagcagaaccgcgtggaagtgaacagcaacgacatcttcgaggtgctgaagcgcgccttcggcgtgctgaagatgtacagggacctgaccaacgcatacaagacctacgaggaaaagctgaacgacggctgcgagttcctgaccagcacagagcaacctctgagcggcatgatcaacaactactacacagtggccctgcggaacatgaacgagagatacggctacaagacagaggacctggccttcatccaggacaagcggttcaagttcgtgaaggacgcctacggcaagaaaaagtcccaagtgaataccggattcttcctgagcctgcaggactacaacggcgacacacagaagaagctgcacctgagcggagtgggaatcgccctgctgatctgcctgttcctggacaagcagtacatcaacatctttctgagcaggctgcccatcttctccagctacaatgcccagagcgaggaacggcggatcatcatcagatccttcggcatcaacagcatcaagctgcccaaggaccggatccacagcgagaagtccaacaagagcgtggccatggatatgctcaacgaagtgaagcggtgccccgacgagctgttcacaacactgtctgccgagaagcagtcccggttcagaatcatcagcgacgaccacaatgaagtgctgatgaagcggagcagcgacagattcgtgcctctgctgctgcagtatatcgattacggcaagctgttcgaccacatcaggttccacgtgaacatgggcaagctgagatacctgctgaaggccgacaagacctgcatcgacggccagaccagagtcagagtgatcgagcagcccctgaacggcttcggcagactggaagaggccgagacaatgcggaagcaagagaacggcaccttcggcaacagcggcatccggatcagagacttcgagaacatgaagcgggacgacgccaatcctgccaactatccctacatcgtggacacctacacacactacatcctggaaaacaacaaggtcgagatgtttatcaacgacaaagaggacagcgccccactgctgcccgtgatcgaggatgatagatacgtggtcaagacaatccccagctgccggatgagcaccctggaaattccagccatggccttccacatgtttctgttcggcagcaagaaaaccgagaagctgatcgtggacgtgcacaaccggtacaagagactgttccaggccatgcagaaagaagaagtgaccgccgagaatatcgccagcttcggaatcgccgagagcgacctgcctcagaagatcctggatctgatcagcggcaatgcccacggcaaggatgtggacgccttcatcagactgaccgtggacgacatgctgaccgacaccgagcggagaatcaagagattcaaggacgaccggaagtccattcggagcgccgacaacaagatgggaaagagaggcttcaagcagatctccacaggcaagctggccgacttcctggccaaggacatcgtgctgtttcagcccagcgtgaacgatggcgagaacaagatcaccggcctgaactaccggatcatgcagagcgccattgccgtgtacgatagcggcgacgattacgaggccaagcagcagttcaagctgatgttcgagaaggcccggctgatcggcaagggcacaacagagcctcatccatttctgtacaaggtgttcgcccgcagcatccccgccaatgccgtcgagttctacgagcgctacctgatcgagcggaagttctacctgaccggcctgtccaacgagatcaagaaaggcaacagagtggatgtgcccttcatccggcgggaccagaacaagtggaaaacacccgccatgaagaccctgggcagaatctacagcgaggatctgcccgtggaactgcccagacagatgttcgacaatgagatcaagtcccacctgaagtccctgccacagatggaaggcatcgacttcaacaatgccaacgtgacctatctgatcgccgagtacatgaagagagtgctggacgacgacttccagaccttctaccagtggaaccgcaactaccggtacatggacatgcttaagggcgagtacgacagaaagggctccctgcagcactgcttcaccagcgtggaagagagagaaggcctctggaaagagcgggcctccagaacagagcggtacagaaagcaggccagcaacaagatccgcagcaaccggcagatgagaaacgccagcagcgaagagatcgagacaatcctggataagcggctgagcaacagccggaacgagtaccagaaaagcgagaaagtgatccggcgctacagagtgcaggatgccctgctgtttctgctggccaaaaagaccctgaccgaactggccgatttcgacggcgagaggttcaaactgaaagaaatcatgcccgacgccgagaagggaatcctgagcgagatcatgcccatgagcttcaccttcgagaaaggcggcaagaagtacaccatcaccagcgagggcatgaagctgaagaactacggcgacttctttgtgctggctagcgacaagaggatcggcaacctgctggaactcgtgggcagcgacatcgtgtccaaagaggattcgcgaggcggtggaggtagtggagggggaggatcaacgcgtgtgagcaagggcgaggagctgttcaccggggtggtgcccatcctggtcgagctggacggcgacgtaaacggccacaagttcagcgtgtccggcgagggcgagggcgatgccacctacggcaagctgaccctgaagttcatctgcaccaccggcaagctgcccgtgccctggcccaccctcgtgaccaccctgacctacggcgtgcagtgcttcagccgctaccccgaccacatgaagcagcacgacttcttcaagtccgccatgcccgaaggctacgtccaggagcgcaccatcttcttcaaggacgacggcaactacaagacccgcgccgaggtgaagttcgagggcgacaccctggtgaaccgcatcgagctgaagggcatcgacttcaaggaggacggcaacatcctggggcacaagctggagtacaactacaacagccacaacgtctatatcatggccgacaagcagaagaacggcatcaaggtgaacttcaagatccgccacaacatcgaggacggcagcgtgcagctcgccgaccactaccagcagaacacccccatcggcgacggccccgtgctgctgcccgacaaccactacctgagcacccagtccgccctgagcaaagaccccaacgagaagcgcgatcacatggtcctgctggagttcgtgaccgccgccgggatcactctcggcatggacgagctgtacaagtagtaa

SEQ ID NO: 223 - DNA, 3837 bp, Artificial Sequence
  chemically synthesized
atggactacaaagaccatgacggtgattataaagatcatgacatcgattacaaggatgacgatgacaagggcggaggatcccttcaactgcctccacttgaaagactgacactgggtagttccggaggcaacatccccgctctggtggaaaaccagaagaagtactttggcacctacagcgtgatggccatgctgaacgctcagaccgtgctggaccacatccagaaggtggccgatattgagggcgagcagaacgagaacaacgagaatctgtggtttcaccccgtgatgagccacctgtacaacgccaagaacggctacgacaagcagcccgagaaaaccatgttcatcatcgagcggctgcagagctacttcccattcctgaagatcatggccgagaaccagagagagtacagcaacggcaagtacaagcagaaccgcgtggaagtgaacagcaacgacatcttcgaggtgctgaagcgcgccttcggcgtgctgaagatgtacagggacctgaccaacgcatacaagacctacgaggaaaagctgaacgacggctgcgagttcctgaccagcacagagcaacctctgagcggcatgatcaacaactactacacagtggccctgcggaacatgaacgagagatacggctacaagacagaggacctggccttcatccaggacaagcggttcaagttcgtgaaggacgcctacggcaagaaaaagtcccaagtgaataccggattcttcctgagcctgcaggactacaacggcgacacacagaagaagctgcacctgagcggagtgggaatcgccctgctgatctgcctgttcctggacaagcagtacatcaacatctttctgagcaggctgcccatcttctccagctacaatgcccagagcgaggaacggcggatcatcatcagatccttcggcatcaacagcatcaagctgcccaaggaccggatccacagcgagaagtccaacaagagcgtggccatggatatgctcaacgaagtgaagcggtgccccgacgagctgttcacaacactgtctgccgagaagcagtcccggttcagaatcatcagcgacgaccacaatgaagtgctgatgaagcggagcagcgacagattcgtgcctctgctgctgcagtatatcgattacggcaagctgttcgaccacatcaggttccacgtgaacatgggcaagctgagatacctgctgaaggccgacaagacctgcatcgacggccagaccagagtcagagtgatcgagcagcccctgaacggcttcggcagactggaagaggccgagacaatgcggaagcaagagaacggcaccttcggcaacagcggcatccggatcagagacttcgagaacatgaagcgggacgacgccaatcctgccaactatccctacatcgtggacacctacacacactacatcctggaaaacaacaaggtcgagatgtttatcaacgacaaagaggacagcgccccactgctgcccgtgatcgaggatgatagatacgtggtcaagacaatccccagctgccggatgagcaccctggaaattccagccatggccttccacatgtttctgttcggcagcaagaaaaccgagaagctgatcgtggacgtgcacaaccggtacaagagactgttccaggccatgcagaaagaagaagtgaccgccgagaatatcgccagcttcggaatcgccgagagcgacctgcctcagaagatcctggatctgatcagcggcaatgcccacggcaaggatgtggacgccttcatcagactgaccgtggacgacatgctgaccgacaccgagcggagaatcaagagattcaaggacgaccggaagtccattcggagcgccgacaacaagatgggaaagagaggcttcaagcagatctccacaggcaagctggccgacttcctggccaaggacatcgtgctgtttcagcccagcgtgaacgatggcgagaacaagatcaccggcctgaactaccggatcatgcagagcgccattgccgtgtacgatagcggcgacgattacgaggccaagcagcagttcaagctgatgttcgagaaggcccggctgatcggcaagggcacaacagagcctcatccatttctgtacaaggtgttcgcccgcagcatccccgccaatgccgtcgagttctacgagcgctacctgatcgagcggaagttctacctgaccggcctgtccaacgagatcaagaaaggcaacagagtggatgtgcccttcatccggcgggaccagaacaagtggaaaacacccgccatgaagaccctgggcagaatctacagcgaggatctgcccgtggaactgcccagacagatgttcgacaatgagatcaagtcccacctgaagtccctgccacagatggaaggcatcgacttcaacaatgccaacgtgacctatctgatcgccgagtacatgaagagagtgctggacgacgacttccagaccttctaccagtggaaccgcaactaccggtacatggacatgcttaagggcgagtacgacagaaagggctccctgcagcactgcttcaccagcgtggaagagagagaaggcctctggaaagagcgggcctccagaacagagcggtacagaaagcaggccagcaacaagatccgcagcaaccggcagatgagaaacgccagcagcgaagagatcgagacaatcctggataagcggctgagcaacagccggaacgagtaccagaaaagcgagaaagtgatccggcgctacagagtgcaggatgccctgctgtttctgctggccaaaaagaccctgaccgaactggccgatttcgacggcgagaggttcaaactgaaagaaatcatgcccgacgccgagaagggaatcctgagcgagatcatgcccatgagcttcaccttcgagaaaggcggcaagaagtacaccatcaccagcgagggcatgaagctgaagaactacggcgacttctttgtgctggctagcgacaagaggatcggcaacctgctggaactcgtgggcagcgacatcgtgtccaaagaggattcgcgaggcggtggaggtagtggagggggaggatcaacgcgtgtgagcaagggcgaggagctgttcaccggggtggtgcccatcctggtcgagctggacggcgacgtaaacggccacaagttcagcgtgtccggcgagggcgagggcgatgccacctacggcaagctgaccctgaagttcatctgcaccaccggcaagctgcccgtgccctggcccaccctcgtgaccaccctgacctacggcgtgcagtgcttcagccgctaccccgaccacatgaagcagcacgacttcttcaagtccgccatgcccgaaggctacgtccaggagcgcaccatcttcttcaaggacgacggcaactacaagacccgcgccgaggtgaagttcgagggcgacaccctggtgaaccgcatcgagctgaagggcatcgacttcaaggaggacggcaacatcctggggcacaagctggagtacaactacaacagccacaacgtctatatcatggccgacaagcagaagaacggcatcaaggtgaacttcaagatccgccacaacatcgaggacggcagcgtgcagctcgccgaccactaccagcagaacacccccatcggcgacggccccgtgctgctgcccgacaaccactacctgagcacccagtccgccctgagcaaagaccccaacgagaagcgcgatcacatggtcctgctggagttcgtgaccgccgccgggatcactctcggcatggacgagctgtacaagtagtaa

SEQ ID NO: 224 - DNA, 3885 bp, Artificial Sequence
  chemically synthesized
atggactacaaagaccatgacggtgattataaagatcatgacatcgattacaaggatgacgatgacaagggcggaatgagtgtgttgacgccgttgcttctgcgagggcttaccgggtctgctagaagacttccggtccccagggccaagatacatagcctcggagacccgggaggcaacatccccgctctggtggaaaaccagaagaagtactttggcacctacagcgtgatggccatgctgaacgctcagaccgtgctggaccacatccagaaggtggccgatattgagggcgagcagaacgagaacaacgagaatctgtggtttcaccccgtgatgagccacctgtacaacgccaagaacggctacgacaagcagcccgagaaaaccatgttcatcatcgagcggctgcagagctacttcccattcctgaagatcatggccgagaaccagagagagtacagcaacggcaagtacaagcagaaccgcgtggaagtgaacagcaacgacatcttcgaggtgctgaagcgcgccttcggcgtgctgaagatgtacagggacctgaccaacgcatacaagacctacgaggaaaagctgaacgacggctgcgagttcctgaccagcacagagcaacctctgagcggcatgatcaacaactactacacagtggccctgcggaacatgaacgagagatacggctacaagacagaggacctggccttcatccaggacaagcggttcaagttcgtgaaggacgcctacggcaagaaaaagtcccaagtgaataccggattcttcctgagcctgcaggactacaacggcgacacacagaagaagctgcacctgagcggagtgggaatcgccctgctgatctgcctgttcctggacaagcagtacatcaacatctttctgagcaggctgcccatcttctccagctacaatgcccagagcgaggaacggcggatcatcatcagatccttcggcatcaacagcatcaagctgcccaaggaccggatccacagcgagaagtccaacaagagcgtggccatggatatgctcaacgaagtgaagcggtgccccgacgagctgttcacaacactgtctgccgagaagcagtcccggttcagaatcatcagcgacgaccacaatgaagtgctgatgaagcggagcagcgacagattcgtgcctctgctgctgcagtatatcgattacggcaagctgttcgaccacatcaggttccacgtgaacatgggcaagctgagatacctgctgaaggccgacaagacctgcatcgacggccagaccagagtcagagtgatcgagcagcccctgaacggcttcggcagactggaagaggccgagacaatgcggaagcaagagaacggcaccttcggcaacagcggcatccggatcagagacttcgagaacatgaagcgggacgacgccaatcctgccaactatccctacatcgtggacacctacacacactacatcctggaaaacaacaaggtcgagatgtttatcaacgacaaagaggacagcgccccactgctgcccgtgatcgaggatgatagatacgtggtcaagacaatccccagctgccggatgagcaccctggaaattccagccatggccttccacatgtttctgttcggcagcaagaaaaccgagaagctgatcgtggacgtgcacaaccggtacaagagactgttccaggccatgcagaaagaagaagtgaccgccgagaatatcgccagcttcggaatcgccgagagcgacctgcctcagaagatcctggatctgatcagcggcaatgcccacggcaaggatgtggacgccttcatcagactgaccgtggacgacatgctgaccgacaccgagcggagaatcaagagattcaaggacgaccggaagtccattcggagcgccgacaacaagatgggaaagagaggcttcaagcagatctccacaggcaagctggccgacttcctggccaaggacatcgtgctgtttcagcccagcgtgaacgatggcgagaacaagatcaccggcctgaactaccggatcatgcagagcgccattgccgtgtacgatagcggcgacgattacgaggccaagcagcagttcaagctgatgttcgagaaggcccggctgatcggcaagggcacaacagagcctcatccatttctgtacaaggtgttcgcccgcagcatccccgccaatgccgtcgagttctacgagcgctacctgatcgagcggaagttctacctgaccggcctgtccaacgagatcaagaaaggcaacagagtggatgtgcccttcatccggcgggaccagaacaagtggaaaacacccgccatgaagaccctgggcagaatctacagcgaggatctgcccgtggaactgcccagacagatgttcgacaatgagatcaagtcccacctgaagtccctgccacagatggaaggcatcgacttcaacaatgccaacgtgacctatctgatcgccgagtacatgaagagagtgctggacgacgacttccagaccttctaccagtggaaccgcaactaccggtacatggacatgcttaagggcgagtacgacagaaagggctccctgcagcactgcttcaccagcgtggaagagagagaaggcctctggaaagagcgggcctccagaacagagcggtacagaaagcaggccagcaacaagatccgcagcaaccggcagatgagaaacgccagcagcgaagagatcgagacaatcctggataagcggctgagcaacagccggaacgagtaccagaaaagcgagaaagtgatccggcgctacagagtgcaggatgccctgctgtttctgctggccaaaaagaccctgaccgaactggccgatttcgacggcgagaggttcaaactgaaagaaatcatgcccgacgccgagaagggaatcctgagcgagatcatgcccatgagcttcaccttcgagaaaggcggcaagaagtacaccatcaccagcgagggcatgaagctgaagaactacggcgacttctttgtgctggctagcgacaagaggatcggcaacctgctggaactcgtgggcagcgacatcgtgtccaaagaggattcgcgaggcggtggaggtagtggagggggaggatcaacgcgtgtgagcaagggcgaggagctgttcaccggggtggtgcccatcctggtcgagctggacggcgacgtaaacggccacaagttcagcgtgtccggcgagggcgagggcgatgccacctacggcaagctgaccctgaagttcatctgcaccaccggcaagctgcccgtgccctggcccaccctcgtgaccaccctgacctacggcgtgcagtgcttcagccgctaccccgaccacatgaagcagcacgacttcttcaagtccgccatgcccgaaggctacgtccaggagcgcaccatcttcttcaaggacgacggcaactacaagacccgcgccgaggtgaagttcgagggcgacaccctggtgaaccgcatcgagctgaagggcatcgacttcaaggaggacggcaacatcctggggcacaagctggagtacaactacaacagccacaacgtctatatcatggccgacaagcagaagaacggcatcaaggtgaacttcaagatccgccacaacatcgaggacggcagcgtgcagctcgccgaccactaccagcagaacacccccatcggcgacggccccgtgctgctgcccgacaaccactacctgagcacccagtccgccctgagcaaagaccccaacgagaagcgcgatcacatggtcctgctggagttcgtgaccgccgccgggatcactctcggcatggacgagctgtacaagtagtaa

SEQ ID NO: 225 - DNA, 4179 bp, Artificial Sequence
  chemically synthesized
atggactacaaagaccatgacggtgattataaagatcatgacatcgattacaaggatgacgatgacaagggcggaatgagtgtgttgacgccgttgcttctgcgagggcttaccgggtctgctagaagacttccggtccccagggccaagatacatagcctcggagacccgatgtctgtgctcactcctctgcttttgcgaggactgactgggtccgccagacgactcccggtgccgagagctaaaatccatagcctgggaaaattggcaactatgtcagtcctgacgccgcttcttctccggggtcttacagggtctgcaagaaggctgcctgtacctcgggcgaaaattcatagcttgggcgacccgatgagtgtattgacgcccctgttgctgagaggattgactgggtcagcgcgccggctccctgtcccccgagctaagattcactcccttggtaagctgggaggcaacatccccgctctggtggaaaaccagaagaagtactttggcacctacagcgtgatggccatgctgaacgctcagaccgtgctggaccacatccagaaggtggccgatattgagggcgagcagaacgagaacaacgagaatctgtggtttcaccccgtgatgagccacctgtacaacgccaagaacggctacgacaagcagcccgagaaaaccatgttcatcatcgagcggctgcagagctacttcccattcctgaagatcatggccgagaaccagagagagtacagcaacggcaagtacaagcagaaccgcgtggaagtgaacagcaacgacatcttcgaggtgctgaagcgcgccttcggcgtgctgaagatgtacagggacctgaccaacgcatacaagacctacgaggaaaagctgaacgacggctgcgagttcctgaccagcacagagcaacctctgagcggcatgatcaacaactactacacagtggccctgcggaacatgaacgagagatacggctacaagacagaggacctggccttcatccaggacaagcggttcaagttcgtgaaggacgcctacggcaagaaaaagtcccaagtgaataccggattcttcctgagcctgcaggactacaacggcgacacacagaagaagctgcacctgagcggagtgggaatcgccctgctgatctgcctgttcctggacaagcagtacatcaacatctttctgagcaggctgcccatcttctccagctacaatgcccagagcgaggaacggcggatcatcatcagatccttcggcatcaacagcatcaagctgcccaaggaccggatccacagcgagaagtccaacaagagcgtggccatggatatgctcaacgaagtgaagcggtgccccgacgagctgttcacaacactgtctgccgagaagcagtcccggttcagaatcatcagcgacgaccacaatgaagtgctgatgaagcggagcagcgacagattcgtgcctctgctgctgcagtatatcgattacggcaagctgttcgaccacatcaggttccacgtgaacatgggcaagctgagatacctgctgaaggccgacaagacctgcatcgacggccagaccagagtcagagtgatcgagcagcccctgaacggcttcggcagactggaagaggccgagacaatgcggaagcaagagaacggcaccttcggcaacagcggcatccggatcagagacttcgagaacatgaagcgggacgacgccaatcctgccaactatccctacatcgtggacacctacacacactacatcctggaaaacaacaaggtcgagatgtttatcaacgacaaagaggacagcgccccactgctgcccgtgatcgaggatgatagatacgtggtcaagacaatccccagctgccggatgagcaccctggaaattccagccatggccttccacatgtttctgttcggcagcaagaaaaccgagaagctgatcgtggacgtgcacaaccggtacaagagactgttccaggccatgcagaaagaagaagtgaccgccgagaatatcgccagcttcggaatcgccgagagcgacctgcctcagaagatcctggatctgatcagcggcaatgcccacggcaaggatgtggacgccttcatcagactgaccgtggacgacatgctgaccgacaccgagcggagaatcaagagattcaaggacgaccggaagtccattcggagcgccgacaacaagatgggaaagagaggcttcaagcagatctccacaggcaagctggccgacttcctggccaaggacatcgtgctgtttcagcccagcgtgaacgatggcgagaacaagatcaccggcctgaactaccggatcatgcagagcgccattgccgtgtacgatagcggcgacgattacgaggccaagcagcagttcaagctgatgttcgagaaggcccggctgatcggcaagggcacaacagagcctcatccatttctgtacaaggtgttcgcccgcagcatccccgccaatgccgtcgagttctacgagcgctacctgatcgagcggaagttctacctgaccggcctgtccaacgagatcaagaaaggcaacagagtggatgtgcccttcatccggcgggaccagaacaagtggaaaacacccgccatgaagaccctgggcagaatctacagcgaggatctgcccgtggaactgcccagacagatgttcgacaatgagatcaagtcccacctgaagtccctgccacagatggaaggcatcgacttcaacaatgccaacgtgacctatctgatcgccgagtacatgaagagagtgctggacgacgacttccagaccttctaccagtggaaccgcaactaccggtacatggacatgcttaagggcgagtacgacagaaagggctccctgcagcactgcttcaccagcgtggaagagagagaaggcctctggaaagagcgggcctccagaacagagcggtacagaaagcaggccagcaacaagatccgcagcaaccggcagatgagaaacgccagcagcgaagagatcgagacaatcctggataagcggctgagcaacagccggaacgagtaccagaaaagcgagaaagtgatccggcgctacagagtgcaggatgccctgctgtttctgctggccaaaaagaccctgaccgaactggccgatttcgacggcgagaggttcaaactgaaagaaatcatgcccgacgccgagaagggaatcctgagcgagatcatgcccatgagcttcaccttcgagaaaggcggcaagaagtacaccatcaccagcgagggcatgaagctgaagaactacggcgacttctttgtgctggctagcgacaagaggatcggcaacctgctggaactcgtgggcagcgacatcgtgtccaaagaggattcgcgaggcggtggaggtagtggagggggaggatcaacgcgtgtgagcaagggcgaggagctgttcaccggggtggtgcccatcctggtcgagctggacggcgacgtaaacggccacaagttcagcgtgtccggcgagggcgagggcgatgccacctacggcaagctgaccctgaagttcatctgcaccaccggcaagctgcccgtgccctggcccaccctcgtgaccaccctgacctacggcgtgcagtgcttcagccgctaccccgaccacatgaagcagcacgacttcttcaagtccgccatgcccgaaggctacgtccaggagcgcaccatcttcttcaaggacgacggcaactacaagacccgcgccgaggtgaagttcgagggcgacaccctggtgaaccgcatcgagctgaagggcatcgacttcaaggaggacggcaacatcctggggcacaagctggagtacaactacaacagccacaacgtctatatcatggccgacaagcagaagaacggcatcaaggtgaacttcaagatccgccacaacatcgaggacggcagcgtgcagctcgccgaccactaccagcagaacacccccatcggcgacggccccgtgctgctgcccgacaaccactacctgagcacccagtccgccctgagcaaagaccccaacgagaagcgcgatcacatggtcctgctggagttcgtgaccgccgccgggatcactctcggcatggacgagctgtacaagtagtaa

SEQ ID NO: 226 - DNA, 3849 bp, Artificial Sequence
  chemically synthesized
atggactacaaagaccatgacggtgattataaagatcatgacatcgattacaaggatgacgatgacaagggcggaatgtacaggatgcaactcctgtcttgcattgcactaagtcttgcacttgtcacgaattccggaggcaacatccccgctctggtggaaaaccagaagaagtactttggcacctacagcgtgatggccatgctgaacgctcagaccgtgctggaccacatccagaaggtggccgatattgagggcgagcagaacgagaacaacgagaatctgtggtttcaccccgtgatgagccacctgtacaacgccaagaacggctacgacaagcagcccgagaaaaccatgttcatcatcgagcggctgcagagctacttcccattcctgaagatcatggccgagaaccagagagagtacagcaacggcaagtacaagcagaaccgcgtggaagtgaacagcaacgacatcttcgaggtgctgaagcgcgccttcggcgtgctgaagatgtacagggacctgaccaacgcatacaagacctacgaggaaaagctgaacgacggctgcgagttcctgaccagcacagagcaacctctgagcggcatgatcaacaactactacacagtggccctgcggaacatgaacgagagatacggctacaagacagaggacctggccttcatccaggacaagcggttcaagttcgtgaaggacgcctacggcaagaaaaagtcccaagtgaataccggattcttcctgagcctgcaggactacaacggcgacacacagaagaagctgcacctgagcggagtgggaatcgccctgctgatctgcctgttcctggacaagcagtacatcaacatctttctgagcaggctgcccatcttctccagctacaatgcccagagcgaggaacggcggatcatcatcagatccttcggcatcaacagcatcaagctgcccaaggaccggatccacagcgagaagtccaacaagagcgtggccatggatatgctcaacgaagtgaagcggtgccccgacgagctgttcacaacactgtctgccgagaagcagtcccggttcagaatcatcagcgacgaccacaatgaagtgctgatgaagcggagcagcgacagattcgtgcctctgctgctgcagtatatcgattacggcaagctgttcgaccacatcaggttccacgtgaacatgggcaagctgagatacctgctgaaggccgacaagacctgcatcgacggccagaccagagtcagagtgatcgagcagcccctgaacggcttcggcagactggaagaggccgagacaatgcggaagcaagagaacggcaccttcggcaacagcggcatccggatcagagacttcgagaacatgaagcgggacgacgccaatcctgccaactatccctacatcgtggacacctacacacactacatcctggaaaacaacaaggtcgagatgtttatcaacgacaaagaggacagcgccccactgctgcccgtgatcgaggatgatagatacgtggtcaagacaatccccagctgccggatgagcaccctggaaattccagccatggccttccacatgtttctgttcggcagcaagaaaaccgagaagctgatcgtggacgtgcacaaccggtacaagagactgttccaggccatgcagaaagaagaagtgaccgccgagaatatcgccagcttcggaatcgccgagagcgacctgcctcagaagatcctggatctgatcagcggcaatgcccacggcaaggatgtggacgccttcatcagactgaccgtggacgacatgctgaccgacaccgagcggagaatcaagagattcaaggacgaccggaagtccattcggagcgccgacaacaagatgggaaagagaggcttcaagcagatctccacaggcaagctggccgacttcctggccaaggacatcgtgctgtttcagcccagcgtgaacgatggcgagaacaagatcaccggcctgaactaccggatcatgcagagcgccattgccgtgtacgatagcggcgacgattacgaggccaagcagcagttcaagctgatgttcgagaaggcccggctgatcggcaagggcacaacagagcctcatccatttctgtacaaggtgttcgcccgcagcatccccgccaatgccgtcgagttctacgagcgctacctgatcgagcggaagttctacctgaccggcctgtccaacgagatcaagaaaggcaacagagtggatgtgcccttcatccggcgggaccagaacaagtggaaaacacccgccatgaagaccctgggcagaatctacagcgaggatctgcccgtggaactgcccagacagatgttcgacaatgagatcaagtcccacctgaagtccctgccacagatggaaggcatcgacttcaacaatgccaacgtgacctatctgatcgccgagtacatgaagagagtgctggacgacgacttccagaccttctaccagtggaaccgcaactaccggtacatggacatgcttaagggcgagtacgacagaaagggctccctgcagcactgcttcaccagcgtggaagagagagaaggcctctggaaagagcgggcctccagaacagagcggtacagaaagcaggccagcaacaagatccgcagcaaccggcagatgagaaacgccagcagcgaagagatcgagacaatcctggataagcggctgagcaacagccggaacgagtaccagaaaagcgagaaagtgatccggcgctacagagtgcaggatgccctgctgtttctgctggccaaaaagaccctgaccgaactggccgatttcgacggcgagaggttcaaactgaaagaaatcatgcccgacgccgagaagggaatcctgagcgagatcatgcccatgagcttcaccttcgagaaaggcggcaagaagtacaccatcaccagcgagggcatgaagctgaagaactacggcgacttctttgtgctggctagcgacaagaggatcggcaacctgctggaactcgtgggcagcgacatcgtgtccaaagaggattcgcgaggcggtggaggtagtggagggggaggatcaacgcgtgtgagcaagggcgaggagctgttcaccggggtggtgcccatcctggtcgagctggacggcgacgtaaacggccacaagttcagcgtgtccggcgagggcgagggcgatgccacctacggcaagctgaccctgaagttcatctgcaccaccggcaagctgcccgtgccctggcccaccctcgtgaccaccctgacctacggcgtgcagtgcttcagccgctaccccgaccacatgaagcagcacgacttcttcaagtccgccatgcccgaaggctacgtccaggagcgcaccatcttcttcaaggacgacggcaactacaagacccgcgccgaggtgaagttcgagggcgacaccctggtgaaccgcatcgagctgaagggcatcgacttcaaggaggacggcaacatcctggggcacaagctggagtacaactacaacagccacaacgtctatatcatggccgacaagcagaagaacggcatcaaggtgaacttcaagatccgccacaacatcgaggacggcagcgtgcagctcgccgaccactaccagcagaacacccccatcggcgacggccccgtgctgctgcccgacaaccactacctgagcacccagtccgccctgagcaaagaccccaacgagaagcgcgatcacatggtcctgctggagttcgtgaccgccgccgggatcactctcggcatggacgagctgtacaagtagtaa

SEQ ID NO: 227 - DNA, 3918 bp, Artificial Sequence
  chemically synthesized
atggactacaaagaccatgacggtgattataaagatcatgacatcgattacaaggatgacgatgacaagggcggaatgggttgttgtttcagcaagacagcggcgaaaggtgaagcagcagcagaaagaccaggcgaggctgcggtagcatcaagtccctccaaggctaatgggcaggaaaacggacacgtcaaagttggaagcggaggcaacatccccgctctggtggaaaaccagaagaagtactttggcacctacagcgtgatggccatgctgaacgctcagaccgtgctggaccacatccagaaggtggccgatattgagggcgagcagaacgagaacaacgagaatctgtggtttcaccccgtgatgagccacctgtacaacgccaagaacggctacgacaagcagcccgagaaaaccatgttcatcatcgagcggctgcagagctacttcccattcctgaagatcatggccgagaaccagagagagtacagcaacggcaagtacaagcagaaccgcgtggaagtgaacagcaacgacatcttcgaggtgctgaagcgcgccttcggcgtgctgaagatgtacagggacctgaccaacgcatacaagacctacgaggaaaagctgaacgacggctgcgagttcctgaccagcacagagcaacctctgagcggcatgatcaacaactactacacagtggccctgcggaacatgaacgagagatacggctacaagacagaggacctggccttcatccaggacaagcggttcaagttcgtgaaggacgcctacggcaagaaaaagtcccaagtgaataccggattcttcctgagcctgcaggactacaacggcgacacacagaagaagctgcacctgagcggagtgggaatcgccctgctgatctgcctgttcctggacaagcagtacatcaacatctttctgagcaggctgcccatcttctccagctacaatgcccagagcgaggaacggcggatcatcatcagatccttcggcatcaacagcatcaagctgcccaaggaccggatccacagcgagaagtccaacaagagcgtggccatggatatgctcaacgaagtgaagcggtgccccgacgagctgttcacaacactgtctgccgagaagcagtcccggttcagaatcatcagcgacgaccacaatgaagtgctgatgaagcggagcagcgacagattcgtgcctctgctgctgcagtatatcgattacggcaagctgttcgaccacatcaggttccacgtgaacatgggcaagctgagatacctgctgaaggccgacaagacctgcatcgacggccagaccagagtcagagtgatcgagcagcccctgaacggcttcggcagactggaagaggccgagacaatgcggaagcaagagaacggcaccttcggcaacagcggcatccggatcagagacttcgagaacatgaagcgggacgacgccaatcctgccaactatccctacatcgtggacacctacacacactacatcctggaaaacaacaaggtcgagatgtttatcaacgacaaagaggacagcgccccactgctgcccgtgatcgaggatgatagatacgtggtcaagacaatccccagctgccggatgagcaccctggaaattccagccatggccttccacatgtttctgttcggcagcaagaaaaccgagaagctgatcgtggacgtgcacaaccggtacaagagactgttccaggccatgcagaaagaagaagtgaccgccgagaatatcgccagcttcggaatcgccgagagcgacctgcctcagaagatcctggatctgatcagcggcaatgcccacggcaaggatgtggacgccttcatcagactgaccgtggacgacatgctgaccgacaccgagcggagaatcaagagattcaaggacgaccggaagtccattcggagcgccgacaacaagatgggaaagagaggcttcaagcagatctccacaggcaagctggccgacttcctggccaaggacatcgtgctgtttcagcccagcgtgaacgatggcgagaacaagatcaccggcctgaactaccggatcatgcagagcgccattgccgtgtacgatagcggcgacgattacgaggccaagcagcagttcaagctgatgttcgagaaggcccggctgatcggcaagggcacaacagagcctcatccatttctgtacaaggtgttcgcccgcagcatccccgccaatgccgtcgagttctacgagcgctacctgatcgagcggaagttctacctgaccggcctgtccaacgagatcaagaaaggcaacagagtggatgtgcccttcatccggcgggaccagaacaagtggaaaacacccgccatgaagaccctgggcagaatctacagcgaggatctgcccgtggaactgcccagacagatgttcgacaatgagatcaagtcccacctgaagtccctgccacagatggaaggcatcgacttcaacaatgccaacgtgacctatctgatcgccgagtacatgaagagagtgctggacgacgacttccagaccttctaccagtggaaccgcaactaccggtacatggacatgcttaagggcgagtacgacagaaagggctccctgcagcactgcttcaccagcgtggaagagagagaaggcctctggaaagagcgggcctccagaacagagcggtacagaaagcaggccagcaacaagatccgcagcaaccggcagatgagaaacgccagcagcgaagagatcgagacaatcctggataagcggctgagcaacagccggaacgagtaccagaaaagcgagaaagtgatccggcgctacagagtgcaggatgccctgctgtttctgctggccaaaaagaccctgaccgaactggccgatttcgacggcgagaggttcaaactgaaagaaatcatgcccgacgccgagaagggaatcctgagcgagatcatgcccatgagcttcaccttcgagaaaggcggcaagaagtacaccatcaccagcgagggcatgaagctgaagaactacggcgacttctttgtgctggctagcgacaagaggatcggcaacctgctggaactcgtgggcagcgacatcgtgtccaaagaggattcgcgaggcggtggaggtagtggagggggaggatcaacgcgtgtgagcaagggcgaggagctgttcaccggggtggtgcccatcctggtcgagctggacggcgacgtaaacggccacaagttcagcgtgtccggcgagggcgagggcgatgccacctacggcaagctgaccctgaagttcatctgcaccaccggcaagctgcccgtgccctggcccaccctcgtgaccaccctgacctacggcgtgcagtgcttcagccgctaccccgaccacatgaagcagcacgacttcttcaagtccgccatgcccgaaggctacgtccaggagcgcaccatcttcttcaaggacgacggcaactacaagacccgcgccgaggtgaagttcgagggcgacaccctggtgaaccgcatcgagctgaagggcatcgacttcaaggaggacggcaacatcctggggcacaagctggagtacaactacaacagccacaacgtctatatcatggccgacaagcagaagaacggcatcaaggtgaacttcaagatccgccacaacatcgaggacggcagcgtgcagctcgccgaccactaccagcagaacacccccatcggcgacggccccgtgctgctgcccgacaaccactacctgagcacccagtccgccctgagcaaagaccccaacgagaagcgcgatcacatggtcctgctggagttcgtgaccgccgccgggatcactctcggcatggacgagctgtacaagtagtaa

SEQ ID NO: 228 - DNA, 3840 bp, Artificial Sequence
  chemically synthesized
atggactacaaagaccatgacggtgattataaagatcatgacatcgattacaaggatgacgatgacaagggcggaatgctgctgcccgtccccctgctgctgggcctgctgggcgccgccgccgacggaggcaacatccccgctctggtggaaaaccagaagaagtactttggcacctacagcgtgatggccatgctgaacgctcagaccgtgctggaccacatccagaaggtggccgatattgagggcgagcagaacgagaacaacgagaatctgtggtttcaccccgtgatgagccacctgtacaacgccaagaacggctacgacaagcagcccgagaaaaccatgttcatcatcgagcggctgcagagctacttcccattcctgaagatcatggccgagaaccagagagagtacagcaacggcaagtacaagcagaaccgcgtggaagtgaacagcaacgacatcttcgaggtgctgaagcgcgccttcggcgtgctgaagatgtacagggacctgaccaacgcatacaagacctacgaggaaaagctgaacgacggctgcgagttcctgaccagcacagagcaacctctgagcggcatgatcaacaactactacacagtggccctgcggaacatgaacgagagatacggctacaagacagaggacctggccttcatccaggacaagcggttcaagttcgtgaaggacgcctacggcaagaaaaagtcccaagtgaataccggattcttcctgagcctgcaggactacaacggcgacacacagaagaagctgcacctgagcggagtgggaatcgccctgctgatctgcctgttcctggacaagcagtacatcaacatctttctgagcaggctgcccatcttctccagctacaatgcccagagcgaggaacggcggatcatcatcagatccttcggcatcaacagcatcaagctgcccaaggaccggatccacagcgagaagtccaacaagagcgtggccatggatatgctcaacgaagtgaagcggtgccccgacgagctgttcacaacactgtctgccgagaagcagtcccggttcagaatcatcagcgacgaccacaatgaagtgctgatgaagcggagcagcgacagattcgtgcctctgctgctgcagtatatcgattacggcaagctgttcgaccacatcaggttccacgtgaacatgggcaagctgagatacctgctgaaggccgacaagacctgcatcgacggccagaccagagtcagagtgatcgagcagcccctgaacggcttcggcagactggaagaggccgagacaatgcggaagcaagagaacggcaccttcggcaacagcggcatccggatcagagacttcgagaacatgaagcgggacgacgccaatcctgccaactatccctacatcgtggacacctacacacactacatcctggaaaacaacaaggtcgagatgtttatcaacgacaaagaggacagcgccccactgctgcccgtgatcgaggatgatagatacgtggtcaagacaatccccagctgccggatgagcaccctggaaattccagccatggccttccacatgtttctgttcggcagcaagaaaaccgagaagctgatcgtggacgtgcacaaccggtacaagagactgttccaggccatgcagaaagaagaagtgaccgccgagaatatcgccagcttcggaatcgccgagagcgacctgcctcagaagatcctggatctgatcagcggcaatgcccacggcaaggatgtggacgccttcatcagactgaccgtggacgacatgctgaccgacaccgagcggagaatcaagagattcaaggacgaccggaagtccattcggagcgccgacaacaagatgggaaagagaggcttcaagcagatctccacaggcaagctggccgacttcctggccaaggacatcgtgctgtttcagcccagcgtgaacgatggcgagaacaagatcaccggcctgaactaccggatcatgcagagcgccattgccgtgtacgatagcggcgacgattacgaggccaagcagcagttcaagctgatgttcgagaaggcccggctgatcggcaagggcacaacagagcctcatccatttctgtacaaggtgttcgcccgcagcatccccgccaatgccgtcgagttctacgagcgctacctgatcgagcggaagttctacctgaccggcctgtccaacgagatcaagaaaggcaacagagtggatgtgcccttcatccggcgggaccagaacaagtggaaaacacccgccatgaagaccctgggcagaatctacagcgaggatctgcccgtggaactgcccagacagatgttcgacaatgagatcaagtcccacctgaagtccctgccacagatggaaggcatcgacttcaacaatgccaacgtgacctatctgatcgccgagtacatgaagagagtgctggacgacgacttccagaccttctaccagtggaaccgcaactaccggtacatggacatgcttaagggcgagtacgacagaaagggctccctgcagcactgcttcaccagcgtggaagagagagaaggcctctggaaagagcgggcctccagaacagagcggtacagaaagcaggccagcaacaagatccgcagcaaccggcagatgagaaacgccagcagcgaagagatcgagacaatcctggataagcggctgagcaacagccggaacgagtaccagaaaagcgagaaagtgatccggcgctacagagtgcaggatgccctgctgtttctgctggccaaaaagaccctgaccgaactggccgatttcgacggcgagaggttcaaactgaaagaaatcatgcccgacgccgagaagggaatcctgagcgagatcatgcccatgagcttcaccttcgagaaaggcggcaagaagtacaccatcaccagcgagggcatgaagctgaagaactacggcgacttctttgtgctggctagcgacaagaggatcggcaacctgctggaactcgtgggcagcgacatcgtgtccaaagaggattcgcgaggcggtggaggtagtggagggggaggatcaacgcgtgtgagcaagggcgaggagctgttcaccggggtggtgcccatcctggtcgagctggacggcgacgtaaacggccacaagttcagcgtgtccggcgagggcgagggcgatgccacctacggcaagctgaccctgaagttcatctgcaccaccggcaagctgcccgtgccctggcccaccctcgtgaccaccctgacctacggcgtgcagtgcttcagccgctaccccgaccacatgaagcagcacgacttcttcaagtccgccatgcccgaaggctacgtccaggagcgcaccatcttcttcaaggacgacggcaactacaagacccgcgccgaggtgaagttcgagggcgacaccctggtgaaccgcatcgagctgaagggcatcgacttcaaggaggacggcaacatcctggggcacaagctggagtacaactacaacagccacaacgtctatatcatggccgacaagcagaagaacggcatcaaggtgaacttcaagatccgccacaacatcgaggacggcagcgtgcagctcgccgaccactaccagcagaacacccccatcggcgacggccccgtgctgctgcccgacaaccactacctgagcacccagtccgccctgagcaaagaccccaacgagaagcgcgatcacatggtcctgctggagttcgtgaccgccgccgggatcactctcggcatggacgagctgtacaagtagtaa

SEQ ID NO: 229 - DNA, 3819 bp, Artificial Sequence
  chemically synthesized
atggactacaaagaccatgacggtgattataaagatcatgacatcgattacaaggatgacgatgacaagggcggagggatcactctcggcaaggacgagctgtaaggaggcaacatccccgctctggtggaaaaccagaagaagtactttggcacctacagcgtgatggccatgctgaacgctcagaccgtgctggaccacatccagaaggtggccgatattgagggcgagcagaacgagaacaacgagaatctgtggtttcaccccgtgatgagccacctgtacaacgccaagaacggctacgacaagcagcccgagaaaaccatgttcatcatcgagcggctgcagagctacttcccattcctgaagatcatggccgagaaccagagagagtacagcaacggcaagtacaagcagaaccgcgtggaagtgaacagcaacgacatcttcgaggtgctgaagcgcgccttcggcgtgctgaagatgtacagggacctgaccaacgcatacaagacctacgaggaaaagctgaacgacggctgcgagttcctgaccagcacagagcaacctctgagcggcatgatcaacaactactacacagtggccctgcggaacatgaacgagagatacggctacaagacagaggacctggccttcatccaggacaagcggttcaagttcgtgaaggacgcctacggcaagaaaaagtcccaagtgaataccggattcttcctgagcctgcaggactacaacggcgacacacagaagaagctgcacctgagcggagtgggaatcgccctgctgatctgcctgttcctggacaagcagtacatcaacatctttctgagcaggctgcccatcttctccagctacaatgcccagagcgaggaacggcggatcatcatcagatccttcggcatcaacagcatcaagctgcccaaggaccggatccacagcgagaagtccaacaagagcgtggccatggatatgctcaacgaagtgaagcggtgccccgacgagctgttcacaacactgtctgccgagaagcagtcccggttcagaatcatcagcgacgaccacaatgaagtgctgatgaagcggagcagcgacagattcgtgcctctgctgctgcagtatatcgattacggcaagctgttcgaccacatcaggttccacgtgaacatgggcaagctgagatacctgctgaaggccgacaagacctgcatcgacggccagaccagagtcagagtgatcgagcagcccctgaacggcttcggcagactggaagaggccgagacaatgcggaagcaagagaacggcaccttcggcaacagcggcatccggatcagagacttcgagaacatgaagcgggacgacgccaatcctgccaactatccctacatcgtggacacctacacacactacatcctggaaaacaacaaggtcgagatgtttatcaacgacaaagaggacagcgccccactgctgcccgtgatcgaggatgatagatacgtggtcaagacaatccccagctgccggatgagcaccctggaaattccagccatggccttccacatgtttctgttcggcagcaagaaaaccgagaagctgatcgtggacgtgcacaaccggtacaagagactgttccaggccatgcagaaagaagaagtgaccgccgagaatatcgccagcttcggaatcgccgagagcgacctgcctcagaagatcctggatctgatcagcggcaatgcccacggcaaggatgtggacgccttcatcagactgaccgtggacgacatgctgaccgacaccgagcggagaatcaagagattcaaggacgaccggaagtccattcggagcgccgacaacaagatgggaaagagaggcttcaagcagatctccacaggcaagctggccgacttcctggccaaggacatcgtgctgtttcagcccagcgtgaacgatggcgagaacaagatcaccggcctgaactaccggatcatgcagagcgccattgccgtgtacgatagcggcgacgattacgaggccaagcagcagttcaagctgatgttcgagaaggcccggctgatcggcaagggcacaacagagcctcatccatttctgtacaaggtgttcgcccgcagcatccccgccaatgccgtcgagttctacgagcgctacctgatcgagcggaagttctacctgaccggcctgtccaacgagatcaagaaaggcaacagagtggatgtgcccttcatccggcgggaccagaacaagtggaaaacacccgccatgaagaccctgggcagaatctacagcgaggatctgcccgtggaactgcccagacagatgttcgacaatgagatcaagtcccacctgaagtccctgccacagatggaaggcatcgacttcaacaatgccaacgtgacctatctgatcgccgagtacatgaagagagtgctggacgacgacttccagaccttctaccagtggaaccgcaactaccggtacatggacatgcttaagggcgagtacgacagaaagggctccctgcagcactgcttcaccagcgtggaagagagagaaggcctctggaaagagcgggcctccagaacagagcggtacagaaagcaggccagcaacaagatccgcagcaaccggcagatgagaaacgccagcagcgaagagatcgagacaatcctggataagcggctgagcaacagccggaacgagtaccagaaaagcgagaaagtgatccggcgctacagagtgcaggatgccctgctgtttctgctggccaaaaagaccctgaccgaactggccgatttcgacggcgagaggttcaaactgaaagaaatcatgcccgacgccgagaagggaatcctgagcgagatcatgcccatgagcttcaccttcgagaaaggcggcaagaagtacaccatcaccagcgagggcatgaagctgaagaactacggcgacttctttgtgctggctagcgacaagaggatcggcaacctgctggaactcgtgggcagcgacatcgtgtccaaagaggattcgcgaggcggtggaggtagtggagggggaggatcaacgcgtgtgagcaagggcgaggagctgttcaccggggtggtgcccatcctggtcgagctggacggcgacgtaaacggccacaagttcagcgtgtccggcgagggcgagggcgatgccacctacggcaagctgaccctgaagttcatctgcaccaccggcaagctgcccgtgccctggcccaccctcgtgaccaccctgacctacggcgtgcagtgcttcagccgctaccccgaccacatgaagcagcacgacttcttcaagtccgccatgcccgaaggctacgtccaggagcgcaccatcttcttcaaggacgacggcaactacaagacccgcgccgaggtgaagttcgagggcgacaccctggtgaaccgcatcgagctgaagggcatcgacttcaaggaggacggcaacatcctggggcacaagctggagtacaactacaacagccacaacgtctatatcatggccgacaagcagaagaacggcatcaaggtgaacttcaagatccgccacaacatcgaggacggcagcgtgcagctcgccgaccactaccagcagaacacccccatcggcgacggccccgtgctgctgcccgacaaccactacctgagcacccagtccgccctgagcaaagaccccaacgagaagcgcgatcacatggtcctgctggagttcgtgaccgccgccgggatcactctcggcatggacgagctgtacaagtagtaa

SEQ ID NO: 230 - DNA, 3801 bp, Artificial Sequence
  chemically synthesized
atggactacaaagaccatgacggtgattataaagatcatgacatcgattacaaggatgacgatgacaagggcggatccaaattataaggaggcaacatccccgctctggtggaaaaccagaagaagtactttggcacctacagcgtgatggccatgctgaacgctcagaccgtgctggaccacatccagaaggtggccgatattgagggcgagcagaacgagaacaacgagaatctgtggtttcaccccgtgatgagccacctgtacaacgccaagaacggctacgacaagcagcccgagaaaaccatgttcatcatcgagcggctgcagagctacttcccattcctgaagatcatggccgagaaccagagagagtacagcaacggcaagtacaagcagaaccgcgtggaagtgaacagcaacgacatcttcgaggtgctgaagcgcgccttcggcgtgctgaagatgtacagggacctgaccaacgcatacaagacctacgaggaaaagctgaacgacggctgcgagttcctgaccagcacagagcaacctctgagcggcatgatcaacaactactacacagtggccctgcggaacatgaacgagagatacggctacaagacagaggacctggccttcatccaggacaagcggttcaagttcgtgaaggacgcctacggcaagaaaaagtcccaagtgaataccggattcttcctgagcctgcaggactacaacggcgacacacagaagaagctgcacctgagcggagtgggaatcgccctgctgatctgcctgttcctggacaagcagtacatcaacatctttctgagcaggctgcccatcttctccagctacaatgcccagagcgaggaacggcggatcatcatcagatccttcggcatcaacagcatcaagctgcccaaggaccggatccacagcgagaagtccaacaagagcgtggccatggatatgctcaacgaagtgaagcggtgccccgacgagctgttcacaacactgtctgccgagaagcagtcccggttcagaatcatcagcgacgaccacaatgaagtgctgatgaagcggagcagcgacagattcgtgcctctgctgctgcagtatatcgattacggcaagctgttcgaccacatcaggttccacgtgaacatgggcaagctgagatacctgctgaaggccgacaagacctgcatcgacggccagaccagagtcagagtgatcgagcagcccctgaacggcttcggcagactggaagaggccgagacaatgcggaagcaagagaacggcaccttcggcaacagcggcatccggatcagagacttcgagaacatgaagcgggacgacgccaatcctgccaactatccctacatcgtggacacctacacacactacatcctggaaaacaacaaggtcgagatgtttatcaacgacaaagaggacagcgccccactgctgcccgtgatcgaggatgatagatacgtggtcaagacaatccccagctgccggatgagcaccctggaaattccagccatggccttccacatgtttctgttcggcagcaagaaaaccgagaagctgatcgtggacgtgcacaaccggtacaagagactgttccaggccatgcagaaagaagaagtgaccgccgagaatatcgccagcttcggaatcgccgagagcgacctgcctcagaagatcctggatctgatcagcggcaatgcccacggcaaggatgtggacgccttcatcagactgaccgtggacgacatgctgaccgacaccgagcggagaatcaagagattcaaggacgaccggaagtccattcggagcgccgacaacaagatgggaaagagaggcttcaagcagatctccacaggcaagctggccgacttcctggccaaggacatcgtgctgtttcagcccagcgtgaacgatggcgagaacaagatcaccggcctgaactaccggatcatgcagagcgccattgccgtgtacgatagcggcgacgattacgaggccaagcagcagttcaagctgatgttcgagaaggcccggctgatcggcaagggcacaacagagcctcatccatttctgtacaaggtgttcgcccgcagcatccccgccaatgccgtcgagttctacgagcgctacctgatcgagcggaagttctacctgaccggcctgtccaacgagatcaagaaaggcaacagagtggatgtgcccttcatccggcgggaccagaacaagtggaaaacacccgccatgaagaccctgggcagaatctacagcgaggatctgcccgtggaactgcccagacagatgttcgacaatgagatcaagtcccacctgaagtccctgccacagatggaaggcatcgacttcaacaatgccaacgtgacctatctgatcgccgagtacatgaagagagtgctggacgacgacttccagaccttctaccagtggaaccgcaactaccggtacatggacatgcttaagggcgagtacgacagaaagggctccctgcagcactgcttcaccagcgtggaagagagagaaggcctctggaaagagcgggcctccagaacagagcggtacagaaagcaggccagcaacaagatccgcagcaaccggcagatgagaaacgccagcagcgaagagatcgagacaatcctggataagcggctgagcaacagccggaacgagtaccagaaaagcgagaaagtgatccggcgctacagagtgcaggatgccctgctgtttctgctggccaaaaagaccctgaccgaactggccgatttcgacggcgagaggttcaaactgaaagaaatcatgcccgacgccgagaagggaatcctgagcgagatcatgcccatgagcttcaccttcgagaaaggcggcaagaagtacaccatcaccagcgagggcatgaagctgaagaactacggcgacttctttgtgctggctagcgacaagaggatcggcaacctgctggaactcgtgggcagcgacatcgtgtccaaagaggattcgcgaggcggtggaggtagtggagggggaggatcaacgcgtgtgagcaagggcgaggagctgttcaccggggtggtgcccatcctggtcgagctggacggcgacgtaaacggccacaagttcagcgtgtccggcgagggcgagggcgatgccacctacggcaagctgaccctgaagttcatctgcaccaccggcaagctgcccgtgccctggcccaccctcgtgaccaccctgacctacggcgtgcagtgcttcagccgctaccccgaccacatgaagcagcacgacttcttcaagtccgccatgcccgaaggctacgtccaggagcgcaccatcttcttcaaggacgacggcaactacaagacccgcgccgaggtgaagttcgagggcgacaccctggtgaaccgcatcgagctgaagggcatcgacttcaaggaggacggcaacatcctggggcacaagctggagtacaactacaacagccacaacgtctatatcatggccgacaagcagaagaacggcatcaaggtgaacttcaagatccgccacaacatcgaggacggcagcgtgcagctcgccgaccactaccagcagaacacccccatcggcgacggccccgtgctgctgcccgacaaccactacctgagcacccagtccgccctgagcaaagaccccaacgagaagcgcgatcacatggtcctgctggagttcgtgaccgccgccgggatcactctcggcatggacgagctgtacaagtagtaa

SEQ ID NO: 231 - DNA, 4218 bp, Artificial Sequence
  chemically synthesized
atggactacaaagaccatgacggtgattataaagatcatgacatcgattacaaggatgacgatgacaagggcggaaactcaaagaaaaggtcactggaggacaacgaaacggaaatcaaagtctccagagacacctggaacactaagaacatgcggtccctggaaccgccacgaagcaagaaacggatacatggaggcaacatccccgctctggtggaaaaccagaagaagtactttggcacctacagcgtgatggccatgctgaacgctcagaccgtgctggaccacatccagaaggtggccgatattgagggcgagcagaacgagaacaacgagaatctgtggtttcaccccgtgatgagccacctgtacaacgccaagaacggctacgacaagcagcccgagaaaaccatgttcatcatcgagcggctgcagagctacttcccattcctgaagatcatggccgagaaccagagagagtacagcaacggcaagtacaagcagaaccgcgtggaagtgaacagcaacgacatcttcgaggtgctgaagcgcgccttcggcgtgctgaagatgtacagggacctgaccaacgcatacaagacctacgaggaaaagctgaacgacggctgcgagttcctgaccagcacagagcaacctctgagcggcatgatcaacaactactacacagtggccctgcggaacatgaacgagagatacggctacaagacagaggacctggccttcatccaggacaagcggttcaagttcgtgaaggacgcctacggcaagaaaaagtcccaagtgaataccggattcttcctgagcctgcaggactacaacggcgacacacagaagaagctgcacctgagcggagtgggaatcgccctgctgatctgcctgttcctggacaagcagtacatcaacatctttctgagcaggctgcccatcttctccagctacaatgcccagagcgaggaacggcggatcatcatcagatccttcggcatcaacagcatcaagctgcccaaggaccggatccacagcgagaagtccaacaagagcgtggccatggatatgctcaacgaagtgaagcggtgccccgacgagctgttcacaacactgtctgccgagaagcagtcccggttcagaatcatcagcgacgaccacaatgaagtgctgatgaagcggagcagcgacagattcgtgcctctgctgctgcagtatatcgattacggcaagctgttcgaccacatcaggttccacgtgaacatgggcaagctgagatacctgctgaaggccgacaagacctgcatcgacggccagaccagagtcagagtgatcgagcagcccctgaacggcttcggcagactggaagaggccgagacaatgcggaagcaagagaacggcaccttcggcaacagcggcatccggatcagagacttcgagaacatgaagcgggacgacgccaatcctgccaactatccctacatcgtggacacctacacacactacatcctggaaaacaacaaggtcgagatgtttatcaacgacaaagaggacagcgccccactgctgcccgtgatcgaggatgatagatacgtggtcaagacaatccccagctgccggatgagcaccctggaaattccagccatggccttccacatgtttctgttcggcagcaagaaaaccgagaagctgatcgtggacgtgcacaaccggtacaagagactgttccaggccatgcagaaagaagaagtgaccgccgagaatatcgccagcttcggaatcgccgagagcgacctgcctcagaagatcctggatctgatcagcggcaatgcccacggcaaggatgtggacgccttcatcagactgaccgtggacgacatgctgaccgacaccgagcggagaatcaagagattcaaggacgaccggaagtccattcggagcgccgacaacaagatgggaaagagaggcttcaagcagatctccacaggcaagctggccgacttcctggccaaggacatcgtgctgtttcagcccagcgtgaacgatggcgagaacaagatcaccggcctgaactaccggatcatgcagagcgccattgccgtgtacgatagcggcgacgattacgaggccaagcagcagttcaagctgatgttcgagaaggcccggctgatcggcaagggcacaacagagcctcatccatttctgtacaaggtgttcgcccgcagcatccccgccaatgccgtcgagttctacgagcgctacctgatcgagcggaagttctacctgaccggcctgtccaacgagatcaagaaaggcaacagagtggatgtgcccttcatccggcgggaccagaacaagtggaaaacacccgccatgaagaccctgggcagaatctacagcgaggatctgcccgtggaactgcccagacagatgttcgacaatgagatcaagtcccacctgaagtccctgccacagatggaaggcatcgacttcaacaatgccaacgtgacctatctgatcgccgagtacatgaagagagtgctggacgacgacttccagaccttctaccagtggaaccgcaactaccggtacatggacatgcttaagggcgagtacgacagaaagggctccctgcagcactgcttcaccagcgtggaagagagagaaggcctctggaaagagcgggcctccagaacagagcggtacagaaagcaggccagcaacaagatccgcagcaaccggcagatgagaaacgccagcagcgaagagatcgagacaatcctggataagcggctgagcaacagccggaacgagtaccagaaaagcgagaaagtgatccggcgctacagagtgcaggatgccctgctgtttctgctggccaaaaagaccctgaccgaactggccgatttcgacggcgagaggttcaaactgaaagaaatcatgcccgacgccgagaagggaatcctgagcgagatcatgcccatgagcttcaccttcgagaaaggcggcaagaagtacaccatcaccagcgagggcatgaagctgaagaactacggcgacttctttgtgctggctagcgacaagaggatcggcaacctgctggaactcgtgggcagcgacatcgtgtccaaagaggatatcatggaagagttcaacaaatacgaccagtgcaggcccgagatcagctccatcgtgttcaacctggaaaagtgggccttcgacacataccccgagctgtctgccagagtggaccgggaagagaaggtggacttcaagagcatcctgaaaatcctgctgaacaacaagaacatcaacaaagagcagagcgacatcctgcggaagatccggaacgccttcgatgcaaacaattaccccgacaaaggcgtggtggaaatcaaggccctgcctgagatcgccatgagcatcaagaaggcctttggggagtacgccatcatgaagtcgcgaggcggtggaggtagtggagggggaggatcaacgcgtgtgagcaagggcgaggaggataacatggccatcatcaaggagttcatgcgcttcaaggtgcacatggagggctccgtgaacggccacgagttcgagatcgagggcgagggcgagggccgcccctacgagggcacccagaccgccaagctgaaggtgaccaagggtggccccctgcccttcgcctgggacatcctgtcccctcagttcatgtacggctccaaggcctacgtgaagcaccccgccgacatccccgactacttgaagctgtccttccccgagggcttcaagtgggagcgcgtgatgaacttcgaggacggcggcgtggtgaccgtgacccaggactcctccctgcaggacggcgagttcatctacaaggtgaagctgcgcggcaccaacttcccctccgacggccccgtaatgcagaagaagaccatgggctgggaggcctcctccgagcggatgtaccccgaggacggcgccctgaagggcgagatcaagcagaggctgaagctgaaggacggcggccactacgacgctgaggtcaagaccacctacaaggccaagaagcccgtgcagctgcccggcgcctacaacgtcaacatcaagttggacatcacctcccacaacgaggactacaccatcgtggaacagtacgaacgcgccgagggccgccactccaccggcggcatggacgagctgtacaagtagtaa

SEQ ID NO: 232 - DNA, 4134 bp, Artificial Sequence
  chemically synthesized
atggactacaaagaccatgacggtgattataaagatcatgacatcgattacaaggatgacgatgacaagggcggacttcaactgcctccacttgaaagactgacactgggaggcaacatccccgctctggtggaaaaccagaagaagtactttggcacctacagcgtgatggccatgctgaacgctcagaccgtgctggaccacatccagaaggtggccgatattgagggcgagcagaacgagaacaacgagaatctgtggtttcaccccgtgatgagccacctgtacaacgccaagaacggctacgacaagcagcccgagaaaaccatgttcatcatcgagcggctgcagagctacttcccattcctgaagatcatggccgagaaccagagagagtacagcaacggcaagtacaagcagaaccgcgtggaagtgaacagcaacgacatcttcgaggtgctgaagcgcgccttcggcgtgctgaagatgtacagggacctgaccaacgcatacaagacctacgaggaaaagctgaacgacggctgcgagttcctgaccagcacagagcaacctctgagcggcatgatcaacaactactacacagtggccctgcggaacatgaacgagagatacggctacaagacagaggacctggccttcatccaggacaagcggttcaagttcgtgaaggacgcctacggcaagaaaaagtcccaagtgaataccggattcttcctgagcctgcaggactacaacggcgacacacagaagaagctgcacctgagcggagtgggaatcgccctgctgatctgcctgttcctggacaagcagtacatcaacatctttctgagcaggctgcccatcttctccagctacaatgcccagagcgaggaacggcggatcatcatcagatccttcggcatcaacagcatcaagctgcccaaggaccggatccacagcgagaagtccaacaagagcgtggccatggatatgctcaacgaagtgaagcggtgccccgacgagctgttcacaacactgtctgccgagaagcagtcccggttcagaatcatcagcgacgaccacaatgaagtgctgatgaagcggagcagcgacagattcgtgcctctgctgctgcagtatatcgattacggcaagctgttcgaccacatcaggttccacgtgaacatgggcaagctgagatacctgctgaaggccgacaagacctgcatcgacggccagaccagagtcagagtgatcgagcagcccctgaacggcttcggcagactggaagaggccgagacaatgcggaagcaagagaacggcaccttcggcaacagcggcatccggatcagagacttcgagaacatgaagcgggacgacgccaatcctgccaactatccctacatcgtggacacctacacacactacatcctggaaaacaacaaggtcgagatgtttatcaacgacaaagaggacagcgccccactgctgcccgtgatcgaggatgatagatacgtggtcaagacaatccccagctgccggatgagcaccctggaaattccagccatggccttccacatgtttctgttcggcagcaagaaaaccgagaagctgatcgtggacgtgcacaaccggtacaagagactgttccaggccatgcagaaagaagaagtgaccgccgagaatatcgccagcttcggaatcgccgagagcgacctgcctcagaagatcctggatctgatcagcggcaatgcccacggcaaggatgtggacgccttcatcagactgaccgtggacgacatgctgaccgacaccgagcggagaatcaagagattcaaggacgaccggaagtccattcggagcgccgacaacaagatgggaaagagaggcttcaagcagatctccacaggcaagctggccgacttcctggccaaggacatcgtgctgtttcagcccagcgtgaacgatggcgagaacaagatcaccggcctgaactaccggatcatgcagagcgccattgccgtgtacgatagcggcgacgattacgaggccaagcagcagttcaagctgatgttcgagaaggcccggctgatcggcaagggcacaacagagcctcatccatttctgtacaaggtgttcgcccgcagcatccccgccaatgccgtcgagttctacgagcgctacctgatcgagcggaagttctacctgaccggcctgtccaacgagatcaagaaaggcaacagagtggatgtgcccttcatccggcgggaccagaacaagtggaaaacacccgccatgaagaccctgggcagaatctacagcgaggatctgcccgtggaactgcccagacagatgttcgacaatgagatcaagtcccacctgaagtccctgccacagatggaaggcatcgacttcaacaatgccaacgtgacctatctgatcgccgagtacatgaagagagtgctggacgacgacttccagaccttctaccagtggaaccgcaactaccggtacatggacatgcttaagggcgagtacgacagaaagggctccctgcagcactgcttcaccagcgtggaagagagagaaggcctctggaaagagcgggcctccagaacagagcggtacagaaagcaggccagcaacaagatccgcagcaaccggcagatgagaaacgccagcagcgaagagatcgagacaatcctggataagcggctgagcaacagccggaacgagtaccagaaaagcgagaaagtgatccggcgctacagagtgcaggatgccctgctgtttctgctggccaaaaagaccctgaccgaactggccgatttcgacggcgagaggttcaaactgaaagaaatcatgcccgacgccgagaagggaatcctgagcgagatcatgcccatgagcttcaccttcgagaaaggcggcaagaagtacaccatcaccagcgagggcatgaagctgaagaactacggcgacttctttgtgctggctagcgacaagaggatcggcaacctgctggaactcgtgggcagcgacatcgtgtccaaagaggatatcatggaagagttcaacaaatacgaccagtgcaggcccgagatcagctccatcgtgttcaacctggaaaagtgggccttcgacacataccccgagctgtctgccagagtggaccgggaagagaaggtggacttcaagagcatcctgaaaatcctgctgaacaacaagaacatcaacaaagagcagagcgacatcctgcggaagatccggaacgccttcgatgcaaacaattaccccgacaaaggcgtggtggaaatcaaggccctgcctgagatcgccatgagcatcaagaaggcctttggggagtacgccatcatgaagtcgcgaggcggtggaggtagtggagggggaggatcaacgcgtgtgagcaagggcgaggaggataacatggccatcatcaaggagttcatgcgcttcaaggtgcacatggagggctccgtgaacggccacgagttcgagatcgagggcgagggcgagggccgcccctacgagggcacccagaccgccaagctgaaggtgaccaagggtggccccctgcccttcgcctgggacatcctgtcccctcagttcatgtacggctccaaggcctacgtgaagcaccccgccgacatccccgactacttgaagctgtccttccccgagggcttcaagtgggagcgcgtgatgaacttcgaggacggcggcgtggtgaccgtgacccaggactcctccctgcaggacggcgagttcatctacaaggtgaagctgcgcggcaccaacttcccctccgacggccccgtaatgcagaagaagaccatgggctgggaggcctcctccgagcggatgtaccccgaggacggcgccctgaagggcgagatcaagcagaggctgaagctgaaggacggcggccactacgacgctgaggtcaagaccacctacaaggccaagaagcccgtgcagctgcccggcgcctacaacgtcaacatcaagttggacatcacctcccacaacgaggactacaccatcgtggaacagtacgaacgcgccgagggccgccactccaccggcggcatggacgagctgtacaagtagtaa

SEQ ID NO: 233 - DNA, 4149 bp, Artificial Sequence
  chemically synthesized
atggactacaaagaccatgacggtgattataaagatcatgacatcgattacaaggatgacgatgacaagggcggaggatcccttcaactgcctccacttgaaagactgacactgggtagttccggaggcaacatccccgctctggtggaaaaccagaagaagtactttggcacctacagcgtgatggccatgctgaacgctcagaccgtgctggaccacatccagaaggtggccgatattgagggcgagcagaacgagaacaacgagaatctgtggtttcaccccgtgatgagccacctgtacaacgccaagaacggctacgacaagcagcccgagaaaaccatgttcatcatcgagcggctgcagagctacttcccattcctgaagatcatggccgagaaccagagagagtacagcaacggcaagtacaagcagaaccgcgtggaagtgaacagcaacgacatcttcgaggtgctgaagcgcgccttcggcgtgctgaagatgtacagggacctgaccaacgcatacaagacctacgaggaaaagctgaacgacggctgcgagttcctgaccagcacagagcaacctctgagcggcatgatcaacaactactacacagtggccctgcggaacatgaacgagagatacggctacaagacagaggacctggccttcatccaggacaagcggttcaagttcgtgaaggacgcctacggcaagaaaaagtcccaagtgaataccggattcttcctgagcctgcaggactacaacggcgacacacagaagaagctgcacctgagcggagtgggaatcgccctgctgatctgcctgttcctggacaagcagtacatcaacatctttctgagcaggctgcccatcttctccagctacaatgcccagagcgaggaacggcggatcatcatcagatccttcggcatcaacagcatcaagctgcccaaggaccggatccacagcgagaagtccaacaagagcgtggccatggatatgctcaacgaagtgaagcggtgccccgacgagctgttcacaacactgtctgccgagaagcagtcccggttcagaatcatcagcgacgaccacaatgaagtgctgatgaagcggagcagcgacagattcgtgcctctgctgctgcagtatatcgattacggcaagctgttcgaccacatcaggttccacgtgaacatgggcaagctgagatacctgctgaaggccgacaagacctgcatcgacggccagaccagagtcagagtgatcgagcagcccctgaacggcttcggcagactggaagaggccgagacaatgcggaagcaagagaacggcaccttcggcaacagcggcatccggatcagagacttcgagaacatgaagcgggacgacgccaatcctgccaactatccctacatcgtggacacctacacacactacatcctggaaaacaacaaggtcgagatgtttatcaacgacaaagaggacagcgccccactgctgcccgtgatcgaggatgatagatacgtggtcaagacaatccccagctgccggatgagcaccctggaaattccagccatggccttccacatgtttctgttcggcagcaagaaaaccgagaagctgatcgtggacgtgcacaaccggtacaagagactgttccaggccatgcagaaagaagaagtgaccgccgagaatatcgccagcttcggaatcgccgagagcgacctgcctcagaagatcctggatctgatcagcggcaatgcccacggcaaggatgtggacgccttcatcagactgaccgtggacgacatgctgaccgacaccgagcggagaatcaagagattcaaggacgaccggaagtccattcggagcgccgacaacaagatgggaaagagaggcttcaagcagatctccacaggcaagctggccgacttcctggccaaggacatcgtgctgtttcagcccagcgtgaacgatggcgagaacaagatcaccggcctgaactaccggatcatgcagagcgccattgccgtgtacgatagcggcgacgattacgaggccaagcagcagttcaagctgatgttcgagaaggcccggctgatcggcaagggcacaacagagcctcatccatttctgtacaaggtgttcgcccgcagcatccccgccaatgccgtcgagttctacgagcgctacctgatcgagcggaagttctacctgaccggcctgtccaacgagatcaagaaaggcaacagagtggatgtgcccttcatccggcgggaccagaacaagtggaaaacacccgccatgaagaccctgggcagaatctacagcgaggatctgcccgtggaactgcccagacagatgttcgacaatgagatcaagtcccacctgaagtccctgccacagatggaaggcatcgacttcaacaatgccaacgtgacctatctgatcgccgagtacatgaagagagtgctggacgacgacttccagaccttctaccagtggaaccgcaactaccggtacatggacatgcttaagggcgagtacgacagaaagggctccctgcagcactgcttcaccagcgtggaagagagagaaggcctctggaaagagcgggcctccagaacagagcggtacagaaagcaggccagcaacaagatccgcagcaaccggcagatgagaaacgccagcagcgaagagatcgagacaatcctggataagcggctgagcaacagccggaacgagtaccagaaaagcgagaaagtgatccggcgctacagagtgcaggatgccctgctgtttctgctggccaaaaagaccctgaccgaactggccgatttcgacggcgagaggttcaaactgaaagaaatcatgcccgacgccgagaagggaatcctgagcgagatcatgcccatgagcttcaccttcgagaaaggcggcaagaagtacaccatcaccagcgagggcatgaagctgaagaactacggcgacttctttgtgctggctagcgacaagaggatcggcaacctgctggaactcgtgggcagcgacatcgtgtccaaagaggatatcatggaagagttcaacaaatacgaccagtgcaggcccgagatcagctccatcgtgttcaacctggaaaagtgggccttcgacacataccccgagctgtctgccagagtggaccgggaagagaaggtggacttcaagagcatcctgaaaatcctgctgaacaacaagaacatcaacaaagagcagagcgacatcctgcggaagatccggaacgccttcgatgcaaacaattaccccgacaaaggcgtggtggaaatcaaggccctgcctgagatcgccatgagcatcaagaaggcctttggggagtacgccatcatgaagtcgcgaggcggtggaggtagtggagggggaggatcaacgcgtgtgagcaagggcgaggaggataacatggccatcatcaaggagttcatgcgcttcaaggtgcacatggagggctccgtgaacggccacgagttcgagatcgagggcgagggcgagggccgcccctacgagggcacccagaccgccaagctgaaggtgaccaagggtggccccctgcccttcgcctgggacatcctgtcccctcagttcatgtacggctccaaggcctacgtgaagcaccccgccgacatccccgactacttgaagctgtccttccccgagggcttcaagtgggagcgcgtgatgaacttcgaggacggcggcgtggtgaccgtgacccaggactcctccctgcaggacggcgagttcatctacaaggtgaagctgcgcggcaccaacttcccctccgacggccccgtaatgcagaagaagaccatgggctgggaggcctcctccgagcggatgtaccccgaggacggcgccctgaagggcgagatcaagcagaggctgaagctgaaggacggcggccactacgacgctgaggtcaagaccacctacaaggccaagaagcccgtgcagctgcccggcgcctacaacgtcaacatcaagttggacatcacctcccacaacgaggactacaccatcgtggaacagtacgaacgcgccgagggccgccactccaccggcggcatggacgagctgtacaagtagtaa

SEQ ID NO: 234 - DNA, 4197 bp, Artificial Sequence
  chemically synthesized
atggactacaaagaccatgacggtgattataaagatcatgacatcgattacaaggatgacgatgacaagggcggaatgagtgtgttgacgccgttgcttctgcgagggcttaccgggtctgctagaagacttccggtccccagggccaagatacatagcctcggagacccgggaggcaacatccccgctctggtggaaaaccagaagaagtactttggcacctacagcgtgatggccatgctgaacgctcagaccgtgctggaccacatccagaaggtggccgatattgagggcgagcagaacgagaacaacgagaatctgtggtttcaccccgtgatgagccacctgtacaacgccaagaacggctacgacaagcagcccgagaaaaccatgttcatcatcgagcggctgcagagctacttcccattcctgaagatcatggccgagaaccagagagagtacagcaacggcaagtacaagcagaaccgcgtggaagtgaacagcaacgacatcttcgaggtgctgaagcgcgccttcggcgtgctgaagatgtacagggacctgaccaacgcatacaagacctacgaggaaaagctgaacgacggctgcgagttcctgaccagcacagagcaacctctgagcggcatgatcaacaactactacacagtggccctgcggaacatgaacgagagatacggctacaagacagaggacctggccttcatccaggacaagcggttcaagttcgtgaaggacgcctacggcaagaaaaagtcccaagtgaataccggattcttcctgagcctgcaggactacaacggcgacacacagaagaagctgcacctgagcggagtgggaatcgccctgctgatctgcctgttcctggacaagcagtacatcaacatctttctgagcaggctgcccatcttctccagctacaatgcccagagcgaggaacggcggatcatcatcagatccttcggcatcaacagcatcaagctgcccaaggaccggatccacagcgagaagtccaacaagagcgtggccatggatatgctcaacgaagtgaagcggtgccccgacgagctgttcacaacactgtctgccgagaagcagtcccggttcagaatcatcagcgacgaccacaatgaagtgctgatgaagcggagcagcgacagattcgtgcctctgctgctgcagtatatcgattacggcaagctgttcgaccacatcaggttccacgtgaacatgggcaagctgagatacctgctgaaggccgacaagacctgcatcgacggccagaccagagtcagagtgatcgagcagcccctgaacggcttcggcagactggaagaggccgagacaatgcggaagcaagagaacggcaccttcggcaacagcggcatccggatcagagacttcgagaacatgaagcgggacgacgccaatcctgccaactatccctacatcgtggacacctacacacactacatcctggaaaacaacaaggtcgagatgtttatcaacgacaaagaggacagcgccccactgctgcccgtgatcgaggatgatagatacgtggtcaagacaatccccagctgccggatgagcaccctggaaattccagccatggccttccacatgtttctgttcggcagcaagaaaaccgagaagctgatcgtggacgtgcacaaccggtacaagagactgttccaggccatgcagaaagaagaagtgaccgccgagaatatcgccagcttcggaatcgccgagagcgacctgcctcagaagatcctggatctgatcagcggcaatgcccacggcaaggatgtggacgccttcatcagactgaccgtggacgacatgctgaccgacaccgagcggagaatcaagagattcaaggacgaccggaagtccattcggagcgccgacaacaagatgggaaagagaggcttcaagcagatctccacaggcaagctggccgacttcctggccaaggacatcgtgctgtttcagcccagcgtgaacgatggcgagaacaagatcaccggcctgaactaccggatcatgcagagcgccattgccgtgtacgatagcggcgacgattacgaggccaagcagcagttcaagctgatgttcgagaaggcccggctgatcggcaagggcacaacagagcctcatccatttctgtacaaggtgttcgcccgcagcatccccgccaatgccgtcgagttctacgagcgctacctgatcgagcggaagttctacctgaccggcctgtccaacgagatcaagaaaggcaacagagtggatgtgcccttcatccggcgggaccagaacaagtggaaaacacccgccatgaagaccctgggcagaatctacagcgaggatctgcccgtggaactgcccagacagatgttcgacaatgagatcaagtcccacctgaagtccctgccacagatggaaggcatcgacttcaacaatgccaacgtgacctatctgatcgccgagtacatgaagagagtgctggacgacgacttccagaccttctaccagtggaaccgcaactaccggtacatggacatgcttaagggcgagtacgacagaaagggctccctgcagcactgcttcaccagcgtggaagagagagaaggcctctggaaagagcgggcctccagaacagagcggtacagaaagcaggccagcaacaagatccgcagcaaccggcagatgagaaacgccagcagcgaagagatcgagacaatcctggataagcggctgagcaacagccggaacgagtaccagaaaagcgagaaagtgatccggcgctacagagtgcaggatgccctgctgtttctgctggccaaaaagaccctgaccgaactggccgatttcgacggcgagaggttcaaactgaaagaaatcatgcccgacgccgagaagggaatcctgagcgagatcatgcccatgagcttcaccttcgagaaaggcggcaagaagtacaccatcaccagcgagggcatgaagctgaagaactacggcgacttctttgtgctggctagcgacaagaggatcggcaacctgctggaactcgtgggcagcgacatcgtgtccaaagaggatatcatggaagagttcaacaaatacgaccagtgcaggcccgagatcagctccatcgtgttcaacctggaaaagtgggccttcgacacataccccgagctgtctgccagagtggaccgggaagagaaggtggacttcaagagcatcctgaaaatcctgctgaacaacaagaacatcaacaaagagcagagcgacatcctgcggaagatccggaacgccttcgatgcaaacaattaccccgacaaaggcgtggtggaaatcaaggccctgcctgagatcgccatgagcatcaagaaggcctttggggagtacgccatcatgaagtcgcgaggcggtggaggtagtggagggggaggatcaacgcgtgtgagcaagggcgaggaggataacatggccatcatcaaggagttcatgcgcttcaaggtgcacatggagggctccgtgaacggccacgagttcgagatcgagggcgagggcgagggccgcccctacgagggcacccagaccgccaagctgaaggtgaccaagggtggccccctgcccttcgcctgggacatcctgtcccctcagttcatgtacggctccaaggcctacgtgaagcaccccgccgacatccccgactacttgaagctgtccttccccgagggcttcaagtgggagcgcgtgatgaacttcgaggacggcggcgtggtgaccgtgacccaggactcctccctgcaggacggcgagttcatctacaaggtgaagctgcgcggcaccaacttcccctccgacggccccgtaatgcagaagaagaccatgggctgggaggcctcctccgagcggatgtaccccgaggacggcgccctgaagggcgagatcaagcagaggctgaagctgaaggacggcggccactacgacgctgaggtcaagaccacctacaaggccaagaagcccgtgcagctgcccggcgcctacaacgtcaacatcaagttggacatcacctcccacaacgaggactacaccatcgtggaacagtacgaacgcgccgagggccgccactccaccggcggcatggacgagctgtacaagtagtaa

SEQ ID NO: 235 - DNA, 4491 bp, Artificial Sequence
  chemically synthesized
atggactacaaagaccatgacggtgattataaagatcatgacatcgattacaaggatgacgatgacaagggcggaatgagtgtgttgacgccgttgcttctgcgagggcttaccgggtctgctagaagacttccggtccccagggccaagatacatagcctcggagacccgatgtctgtgctcactcctctgcttttgcgaggactgactgggtccgccagacgactcccggtgccgagagctaaaatccatagcctgggaaaattggcaactatgtcagtcctgacgccgcttcttctccggggtcttacagggtctgcaagaaggctgcctgtacctcgggcgaaaattcatagcttgggcgacccgatgagtgtattgacgcccctgttgctgagaggattgactgggtcagcgcgccggctccctgtcccccgagctaagattcactcccttggtaagctgggaggcaacatccccgctctggtggaaaaccagaagaagtactttggcacctacagcgtgatggccatgctgaacgctcagaccgtgctggaccacatccagaaggtggccgatattgagggcgagcagaacgagaacaacgagaatctgtggtttcaccccgtgatgagccacctgtacaacgccaagaacggctacgacaagcagcccgagaaaaccatgttcatcatcgagcggctgcagagctacttcccattcctgaagatcatggccgagaaccagagagagtacagcaacggcaagtacaagcagaaccgcgtggaagtgaacagcaacgacatcttcgaggtgctgaagcgcgccttcggcgtgctgaagatgtacagggacctgaccaacgcatacaagacctacgaggaaaagctgaacgacggctgcgagttcctgaccagcacagagcaacctctgagcggcatgatcaacaactactacacagtggccctgcggaacatgaacgagagatacggctacaagacagaggacctggccttcatccaggacaagcggttcaagttcgtgaaggacgcctacggcaagaaaaagtcccaagtgaataccggattcttcctgagcctgcaggactacaacggcgacacacagaagaagctgcacctgagcggagtgggaatcgccctgctgatctgcctgttcctggacaagcagtacatcaacatctttctgagcaggctgcccatcttctccagctacaatgcccagagcgaggaacggcggatcatcatcagatccttcggcatcaacagcatcaagctgcccaaggaccggatccacagcgagaagtccaacaagagcgtggccatggatatgctcaacgaagtgaagcggtgccccgacgagctgttcacaacactgtctgccgagaagcagtcccggttcagaatcatcagcgacgaccacaatgaagtgctgatgaagcggagcagcgacagattcgtgcctctgctgctgcagtatatcgattacggcaagctgttcgaccacatcaggttccacgtgaacatgggcaagctgagatacctgctgaaggccgacaagacctgcatcgacggccagaccagagtcagagtgatcgagcagcccctgaacggcttcggcagactggaagaggccgagacaatgcggaagcaagagaacggcaccttcggcaacagcggcatccggatcagagacttcgagaacatgaagcgggacgacgccaatcctgccaactatccctacatcgtggacacctacacacactacatcctggaaaacaacaaggtcgagatgtttatcaacgacaaagaggacagcgccccactgctgcccgtgatcgaggatgatagatacgtggtcaagacaatccccagctgccggatgagcaccctggaaattccagccatggccttccacatgtttctgttcggcagcaagaaaaccgagaagctgatcgtggacgtgcacaaccggtacaagagactgttccaggccatgcagaaagaagaagtgaccgccgagaatatcgccagcttcggaatcgccgagagcgacctgcctcagaagatcctggatctgatcagcggcaatgcccacggcaaggatgtggacgccttcatcagactgaccgtggacgacatgctgaccgacaccgagcggagaatcaagagattcaaggacgaccggaagtccattcggagcgccgacaacaagatgggaaagagaggcttcaagcagatctccacaggcaagctggccgacttcctggccaaggacatcgtgctgtttcagcccagcgtgaacgatggcgagaacaagatcaccggcctgaactaccggatcatgcagagcgccattgccgtgtacgatagcggcgacgattacgaggccaagcagcagttcaagctgatgttcgagaaggcccggctgatcggcaagggcacaacagagcctcatccatttctgtacaaggtgttcgcccgcagcatccccgccaatgccgtcgagttctacgagcgctacctgatcgagcggaagttctacctgaccggcctgtccaacgagatcaagaaaggcaacagagtggatgtgcccttcatccggcgggaccagaacaagtggaaaacacccgccatgaagaccctgggcagaatctacagcgaggatctgcccgtggaactgcccagacagatgttcgacaatgagatcaagtcccacctgaagtccctgccacagatggaaggcatcgacttcaacaatgccaacgtgacctatctgatcgccgagtacatgaagagagtgctggacgacgacttccagaccttctaccagtggaaccgcaactaccggtacatggacatgcttaagggcgagtacgacagaaagggctccctgcagcactgcttcaccagcgtggaagagagagaaggcctctggaaagagcgggcctccagaacagagcggtacagaaagcaggccagcaacaagatccgcagcaaccggcagatgagaaacgccagcagcgaagagatcgagacaatcctggataagcggctgagcaacagccggaacgagtaccagaaaagcgagaaagtgatccggcgctacagagtgcaggatgccctgctgtttctgctggccaaaaagaccctgaccgaactggccgatttcgacggcgagaggttcaaactgaaagaaatcatgcccgacgccgagaagggaatcctgagcgagatcatgcccatgagcttcaccttcgagaaaggcggcaagaagtacaccatcaccagcgagggcatgaagctgaagaactacggcgacttctttgtgctggctagcgacaagaggatcggcaacctgctggaactcgtgggcagcgacatcgtgtccaaagaggatatcatggaagagttcaacaaatacgaccagtgcaggcccgagatcagctccatcgtgttcaacctggaaaagtgggccttcgacacataccccgagctgtctgccagagtggaccgggaagagaaggtggacttcaagagcatcctgaaaatcctgctgaacaacaagaacatcaacaaagagcagagcgacatcctgcggaagatccggaacgccttcgatgcaaacaattaccccgacaaaggcgtggtggaaatcaaggccctgcctgagatcgccatgagcatcaagaaggcctttggggagtacgccatcatgaagtcgcgaggcggtggaggtagtggagggggaggatcaacgcgtgtgagcaagggcgaggaggataacatggccatcatcaaggagttcatgcgcttcaaggtgcacatggagggctccgtgaacggccacgagttcgagatcgagggcgagggcgagggccgcccctacgagggcacccagaccgccaagctgaaggtgaccaagggtggccccctgcccttcgcctgggacatcctgtcccctcagttcatgtacggctccaaggcctacgtgaagcaccccgccgacatccccgactacttgaagctgtccttccccgagggcttcaagtgggagcgcgtgatgaacttcgaggacggcggcgtggtgaccgtgacccaggactcctccctgcaggacggcgagttcatctacaaggtgaagctgcgcggcaccaacttcccctccgacggccccgtaatgcagaagaagaccatgggctgggaggcctcctccgagcggatgtaccccgaggacggcgccctgaagggcgagatcaagcagaggctgaagctgaaggacggcggccactacgacgctgaggtcaagaccacctacaaggccaagaagcccgtgcagctgcccggcgcctacaacgtcaacatcaagttggacatcacctcccacaacgaggactacaccatcgtggaacagtacgaacgcgccgagggccgccactccaccggcggcatggacgagctgtacaagtagtaa

SEQ ID NO: 236 - DNA, 4161 bp, Artificial Sequence
  chemically synthesized
atggactacaaagaccatgacggtgattataaagatcatgacatcgattacaaggatgacgatgacaagggcggaatgtacaggatgcaactcctgtcttgcattgcactaagtcttgcacttgtcacgaattccggaggcaacatccccgctctggtggaaaaccagaagaagtactttggcacctacagcgtgatggccatgctgaacgctcagaccgtgctggaccacatccagaaggtggccgatattgagggcgagcagaacgagaacaacgagaatctgtggtttcaccccgtgatgagccacctgtacaacgccaagaacggctacgacaagcagcccgagaaaaccatgttcatcatcgagcggctgcagagctacttcccattcctgaagatcatggccgagaaccagagagagtacagcaacggcaagtacaagcagaaccgcgtggaagtgaacagcaacgacatcttcgaggtgctgaagcgcgccttcggcgtgctgaagatgtacagggacctgaccaacgcatacaagacctacgaggaaaagctgaacgacggctgcgagttcctgaccagcacagagcaacctctgagcggcatgatcaacaactactacacagtggccctgcggaacatgaacgagagatacggctacaagacagaggacctggccttcatccaggacaagcggttcaagttcgtgaaggacgcctacggcaagaaaaagtcccaagtgaataccggattcttcctgagcctgcaggactacaacggcgacacacagaagaagctgcacctgagcggagtgggaatcgccctgctgatctgcctgttcctggacaagcagtacatcaacatctttctgagcaggctgcccatcttctccagctacaatgcccagagcgaggaacggcggatcatcatcagatccttcggcatcaacagcatcaagctgcccaaggaccggatccacagcgagaagtccaacaagagcgtggccatggatatgctcaacgaagtgaagcggtgccccgacgagctgttcacaacactgtctgccgagaagcagtcccggttcagaatcatcagcgacgaccacaatgaagtgctgatgaagcggagcagcgacagattcgtgcctctgctgctgcagtatatcgattacggcaagctgttcgaccacatcaggttccacgtgaacatgggcaagctgagatacctgctgaaggccgacaagacctgcatcgacggccagaccagagtcagagtgatcgagcagcccctgaacggcttcggcagactggaagaggccgagacaatgcggaagcaagagaacggcaccttcggcaacagcggcatccggatcagagacttcgagaacatgaagcgggacgacgccaatcctgccaactatccctacatcgtggacacctacacacactacatcctggaaaacaacaaggtcgagatgtttatcaacgacaaagaggacagcgccccactgctgcccgtgatcgaggatgatagatacgtggtcaagacaatccccagctgccggatgagcaccctggaaattccagccatggccttccacatgtttctgttcggcagcaagaaaaccgagaagctgatcgtggacgtgcacaaccggtacaagagactgttccaggccatgcagaaagaagaagtgaccgccgagaatatcgccagcttcggaatcgccgagagcgacctgcctcagaagatcctggatctgatcagcggcaatgcccacggcaaggatgtggacgccttcatcagactgaccgtggacgacatgctgaccgacaccgagcggagaatcaagagattcaaggacgaccggaagtccattcggagcgccgacaacaagatgggaaagagaggcttcaagcagatctccacaggcaagctggccgacttcctggccaaggacatcgtgctgtttcagcccagcgtgaacgatggcgagaacaagatcaccggcctgaactaccggatcatgcagagcgccattgccgtgtacgatagcggcgacgattacgaggccaagcagcagttcaagctgatgttcgagaaggcccggctgatcggcaagggcacaacagagcctcatccatttctgtacaaggtgttcgcccgcagcatccccgccaatgccgtcgagttctacgagcgctacctgatcgagcggaagttctacctgaccggcctgtccaacgagatcaagaaaggcaacagagtggatgtgcccttcatccggcgggaccagaacaagtggaaaacacccgccatgaagaccctgggcagaatctacagcgaggatctgcccgtggaactgcccagacagatgttcgacaatgagatcaagtcccacctgaagtccctgccacagatggaaggcatcgacttcaacaatgccaacgtgacctatctgatcgccgagtacatgaagagagtgctggacgacgacttccagaccttctaccagtggaaccgcaactaccggtacatggacatgcttaagggcgagtacgacagaaagggctccctgcagcactgcttcaccagcgtggaagagagagaaggcctctggaaagagcgggcctccagaacagagcggtacagaaagcaggccagcaacaagatccgcagcaaccggcagatgagaaacgccagcagcgaagagatcgagacaatcctggataagcggctgagcaacagccggaacgagtaccagaaaagcgagaaagtgatccggcgctacagagtgcaggatgccctgctgtttctgctggccaaaaagaccctgaccgaactggccgatttcgacggcgagaggttcaaactgaaagaaatcatgcccgacgccgagaagggaatcctgagcgagatcatgcccatgagcttcaccttcgagaaaggcggcaagaagtacaccatcaccagcgagggcatgaagctgaagaactacggcgacttctttgtgctggctagcgacaagaggatcggcaacctgctggaactcgtgggcagcgacatcgtgtccaaagaggatatcatggaagagttcaacaaatacgaccagtgcaggcccgagatcagctccatcgtgttcaacctggaaaagtgggccttcgacacataccccgagctgtctgccagagtggaccgggaagagaaggtggacttcaagagcatcctgaaaatcctgctgaacaacaagaacatcaacaaagagcagagcgacatcctgcggaagatccggaacgccttcgatgcaaacaattaccccgacaaaggcgtggtggaaatcaaggccctgcctgagatcgccatgagcatcaagaaggcctttggggagtacgccatcatgaagtcgcgaggcggtggaggtagtggagggggaggatcaacgcgtgtgagcaagggcgaggaggataacatggccatcatcaaggagttcatgcgcttcaaggtgcacatggagggctccgtgaacggccacgagttcgagatcgagggcgagggcgagggccgcccctacgagggcacccagaccgccaagctgaaggtgaccaagggtggccccctgcccttcgcctgggacatcctgtcccctcagttcatgtacggctccaaggcctacgtgaagcaccccgccgacatccccgactacttgaagctgtccttccccgagggcttcaagtgggagcgcgtgatgaacttcgaggacggcggcgtggtgaccgtgacccaggactcctccctgcaggacggcgagttcatctacaaggtgaagctgcgcggcaccaacttcccctccgacggccccgtaatgcagaagaagaccatgggctgggaggcctcctccgagcggatgtaccccgaggacggcgccctgaagggcgagatcaagcagaggctgaagctgaaggacggcggccactacgacgctgaggtcaagaccacctacaaggccaagaagcccgtgcagctgcccggcgcctacaacgtcaacatcaagttggacatcacctcccacaacgaggactacaccatcgtggaacagtacgaacgcgccgagggccgccactccaccggcggcatggacgagctgtacaagtagtaa

SEQ ID NO: 237 - DNA, 4230 bp, Artificial Sequence
  chemically synthesized
atggactacaaagaccatgacggtgattataaagatcatgacatcgattacaaggatgacgatgacaagggcggaatgggttgttgtttcagcaagacagcggcgaaaggtgaagcagcagcagaaagaccaggcgaggctgcggtagcatcaagtccctccaaggctaatgggcaggaaaacggacacgtcaaagttggaagcggaggcaacatccccgctctggtggaaaaccagaagaagtactttggcacctacagcgtgatggccatgctgaacgctcagaccgtgctggaccacatccagaaggtggccgatattgagggcgagcagaacgagaacaacgagaatctgtggtttcaccccgtgatgagccacctgtacaacgccaagaacggctacgacaagcagcccgagaaaaccatgttcatcatcgagcggctgcagagctacttcccattcctgaagatcatggccgagaaccagagagagtacagcaacggcaagtacaagcagaaccgcgtggaagtgaacagcaacgacatcttcgaggtgctgaagcgcgccttcggcgtgctgaagatgtacagggacctgaccaacgcatacaagacctacgaggaaaagctgaacgacggctgcgagttcctgaccagcacagagcaacctctgagcggcatgatcaacaactactacacagtggccctgcggaacatgaacgagagatacggctacaagacagaggacctggccttcatccaggacaagcggttcaagttcgtgaaggacgcctacggcaagaaaaagtcccaagtgaataccggattcttcctgagcctgcaggactacaacggcgacacacagaagaagctgcacctgagcggagtgggaatcgccctgctgatctgcctgttcctggacaagcagtacatcaacatctttctgagcaggctgcccatcttctccagctacaatgcccagagcgaggaacggcggatcatcatcagatccttcggcatcaacagcatcaagctgcccaaggaccggatccacagcgagaagtccaacaagagcgtggccatggatatgctcaacgaagtgaagcggtgccccgacgagctgttcacaacactgtctgccgagaagcagtcccggttcagaatcatcagcgacgaccacaatgaagtgctgatgaagcggagcagcgacagattcgtgcctctgctgctgcagtatatcgattacggcaagctgttcgaccacatcaggttccacgtgaacatgggcaagctgagatacctgctgaaggccgacaagacctgcatcgacggccagaccagagtcagagtgatcgagcagcccctgaacggcttcggcagactggaagaggccgagacaatgcggaagcaagagaacggcaccttcggcaacagcggcatccggatcagagacttcgagaacatgaagcgggacgacgccaatcctgccaactatccctacatcgtggacacctacacacactacatcctggaaaacaacaaggtcgagatgtttatcaacgacaaagaggacagcgccccactgctgcccgtgatcgaggatgatagatacgtggtcaagacaatccccagctgccggatgagcaccctggaaattccagccatggccttccacatgtttctgttcggcagcaagaaaaccgagaagctgatcgtggacgtgcacaaccggtacaagagactgttccaggccatgcagaaagaagaagtgaccgccgagaatatcgccagcttcggaatcgccgagagcgacctgcctcagaagatcctggatctgatcagcggcaatgcccacggcaaggatgtggacgccttcatcagactgaccgtggacgacatgctgaccgacaccgagcggagaatcaagagattcaaggacgaccggaagtccattcggagcgccgacaacaagatgggaaagagaggcttcaagcagatctccacaggcaagctggccgacttcctggccaaggacatcgtgctgtttcagcccagcgtgaacgatggcgagaacaagatcaccggcctgaactaccggatcatgcagagcgccattgccgtgtacgatagcggcgacgattacgaggccaagcagcagttcaagctgatgttcgagaaggcccggctgatcggcaagggcacaacagagcctcatccatttctgtacaaggtgttcgcccgcagcatccccgccaatgccgtcgagttctacgagcgctacctgatcgagcggaagttctacctgaccggcctgtccaacgagatcaagaaaggcaacagagtggatgtgcccttcatccggcgggaccagaacaagtggaaaacacccgccatgaagaccctgggcagaatctacagcgaggatctgcccgtggaactgcccagacagatgttcgacaatgagatcaagtcccacctgaagtccctgccacagatggaaggcatcgacttcaacaatgccaacgtgacctatctgatcgccgagtacatgaagagagtgctggacgacgacttccagaccttctaccagtggaaccgcaactaccggtacatggacatgcttaagggcgagtacgacagaaagggctccctgcagcactgcttcaccagcgtggaagagagagaaggcctctggaaagagcgggcctccagaacagagcggtacagaaagcaggccagcaacaagatccgcagcaaccggcagatgagaaacgccagcagcgaagagatcgagacaatcctggataagcggctgagcaacagccggaacgagtaccagaaaagcgagaaagtgatccggcgctacagagtgcaggatgccctgctgtttctgctggccaaaaagaccctgaccgaactggccgatttcgacggcgagaggttcaaactgaaagaaatcatgcccgacgccgagaagggaatcctgagcgagatcatgcccatgagcttcaccttcgagaaaggcggcaagaagtacaccatcaccagcgagggcatgaagctgaagaactacggcgacttctttgtgctggctagcgacaagaggatcggcaacctgctggaactcgtgggcagcgacatcgtgtccaaagaggatatcatggaagagttcaacaaatacgaccagtgcaggcccgagatcagctccatcgtgttcaacctggaaaagtgggccttcgacacataccccgagctgtctgccagagtggaccgggaagagaaggtggacttcaagagcatcctgaaaatcctgctgaacaacaagaacatcaacaaagagcagagcgacatcctgcggaagatccggaacgccttcgatgcaaacaattaccccgacaaaggcgtggtggaaatcaaggccctgcctgagatcgccatgagcatcaagaaggcctttggggagtacgccatcatgaagtcgcgaggcggtggaggtagtggagggggaggatcaacgcgtgtgagcaagggcgaggaggataacatggccatcatcaaggagttcatgcgcttcaaggtgcacatggagggctccgtgaacggccacgagttcgagatcgagggcgagggcgagggccgcccctacgagggcacccagaccgccaagctgaaggtgaccaagggtggccccctgcccttcgcctgggacatcctgtcccctcagttcatgtacggctccaaggcctacgtgaagcaccccgccgacatccccgactacttgaagctgtccttccccgagggcttcaagtgggagcgcgtgatgaacttcgaggacggcggcgtggtgaccgtgacccaggactcctccctgcaggacggcgagttcatctacaaggtgaagctgcgcggcaccaacttcccctccgacggccccgtaatgcagaagaagaccatgggctgggaggcctcctccgagcggatgtaccccgaggacggcgccctgaagggcgagatcaagcagaggctgaagctgaaggacggcggccactacgacgctgaggtcaagaccacctacaaggccaagaagcccgtgcagctgcccggcgcctacaacgtcaacatcaagttggacatcacctcccacaacgaggactacaccatcgtggaacagtacgaacgcgccgagggccgccactccaccggcggcatggacgagctgtacaagtagtaa

SEQ ID NO: 238 - DNA, 4152 bp, Artificial Sequence
  chemically synthesized
atggactacaaagaccatgacggtgattataaagatcatgacatcgattacaaggatgacgatgacaagggcggaatgctgctgcccgtccccctgctgctgggcctgctgggcgccgccgccgacggaggcaacatccccgctctggtggaaaaccagaagaagtactttggcacctacagcgtgatggccatgctgaacgctcagaccgtgctggaccacatccagaaggtggccgatattgagggcgagcagaacgagaacaacgagaatctgtggtttcaccccgtgatgagccacctgtacaacgccaagaacggctacgacaagcagcccgagaaaaccatgttcatcatcgagcggctgcagagctacttcccattcctgaagatcatggccgagaaccagagagagtacagcaacggcaagtacaagcagaaccgcgtggaagtgaacagcaacgacatcttcgaggtgctgaagcgcgccttcggcgtgctgaagatgtacagggacctgaccaacgcatacaagacctacgaggaaaagctgaacgacggctgcgagttcctgaccagcacagagcaacctctgagcggcatgatcaacaactactacacagtggccctgcggaacatgaacgagagatacggctacaagacagaggacctggccttcatccaggacaagcggttcaagttcgtgaaggacgcctacggcaagaaaaagtcccaagtgaataccggattcttcctgagcctgcaggactacaacggcgacacacagaagaagctgcacctgagcggagtgggaatcgccctgctgatctgcctgttcctggacaagcagtacatcaacatctttctgagcaggctgcccatcttctccagctacaatgcccagagcgaggaacggcggatcatcatcagatccttcggcatcaacagcatcaagctgcccaaggaccggatccacagcgagaagtccaacaagagcgtggccatggatatgctcaacgaagtgaagcggtgccccgacgagctgttcacaacactgtctgccgagaagcagtcccggttcagaatcatcagcgacgaccacaatgaagtgctgatgaagcggagcagcgacagattcgtgcctctgctgctgcagtatatcgattacggcaagctgttcgaccacatcaggttccacgtgaacatgggcaagctgagatacctgctgaaggccgacaagacctgcatcgacggccagaccagagtcagagtgatcgagcagcccctgaacggcttcggcagactggaagaggccgagacaatgcggaagcaagagaacggcaccttcggcaacagcggcatccggatcagagacttcgagaacatgaagcgggacgacgccaatcctgccaactatccctacatcgtggacacctacacacactacatcctggaaaacaacaaggtcgagatgtttatcaacgacaaagaggacagcgccccactgctgcccgtgatcgaggatgatagatacgtggtcaagacaatccccagctgccggatgagcaccctggaaattccagccatggccttccacatgtttctgttcggcagcaagaaaaccgagaagctgatcgtggacgtgcacaaccggtacaagagactgttccaggccatgcagaaagaagaagtgaccgccgagaatatcgccagcttcggaatcgccgagagcgacctgcctcagaagatcctggatctgatcagcggcaatgcccacggcaaggatgtggacgccttcatcagactgaccgtggacgacatgctgaccgacaccgagcggagaatcaagagattcaaggacgaccggaagtccattcggagcgccgacaacaagatgggaaagagaggcttcaagcagatctccacaggcaagctggccgacttcctggccaaggacatcgtgctgtttcagcccagcgtgaacgatggcgagaacaagatcaccggcctgaactaccggatcatgcagagcgccattgccgtgtacgatagcggcgacgattacgaggccaagcagcagttcaagctgatgttcgagaaggcccggctgatcggcaagggcacaacagagcctcatccatttctgtacaaggtgttcgcccgcagcatccccgccaatgccgtcgagttctacgagcgctacctgatcgagcggaagttctacctgaccggcctgtccaacgagatcaagaaaggcaacagagtggatgtgcccttcatccggcgggaccagaacaagtggaaaacacccgccatgaagaccctgggcagaatctacagcgaggatctgcccgtggaactgcccagacagatgttcgacaatgagatcaagtcccacctgaagtccctgccacagatggaaggcatcgacttcaacaatgccaacgtgacctatctgatcgccgagtacatgaagagagtgctggacgacgacttccagaccttctaccagtggaaccgcaactaccggtacatggacatgcttaagggcgagtacgacagaaagggctccctgcagcactgcttcaccagcgtggaagagagagaaggcctctggaaagagcgggcctccagaacagagcggtacagaaagcaggccagcaacaagatccgcagcaaccggcagatgagaaacgccagcagcgaagagatcgagacaatcctggataagcggctgagcaacagccggaacgagtaccagaaaagcgagaaagtgatccggcgctacagagtgcaggatgccctgctgtttctgctggccaaaaagaccctgaccgaactggccgatttcgacggcgagaggttcaaactgaaagaaatcatgcccgacgccgagaagggaatcctgagcgagatcatgcccatgagcttcaccttcgagaaaggcggcaagaagtacaccatcaccagcgagggcatgaagctgaagaactacggcgacttctttgtgctggctagcgacaagaggatcggcaacctgctggaactcgtgggcagcgacatcgtgtccaaagaggatatcatggaagagttcaacaaatacgaccagtgcaggcccgagatcagctccatcgtgttcaacctggaaaagtgggccttcgacacataccccgagctgtctgccagagtggaccgggaagagaaggtggacttcaagagcatcctgaaaatcctgctgaacaacaagaacatcaacaaagagcagagcgacatcctgcggaagatccggaacgccttcgatgcaaacaattaccccgacaaaggcgtggtggaaatcaaggccctgcctgagatcgccatgagcatcaagaaggcctttggggagtacgccatcatgaagtcgcgaggcggtggaggtagtggagggggaggatcaacgcgtgtgagcaagggcgaggaggataacatggccatcatcaaggagttcatgcgcttcaaggtgcacatggagggctccgtgaacggccacgagttcgagatcgagggcgagggcgagggccgcccctacgagggcacccagaccgccaagctgaaggtgaccaagggtggccccctgcccttcgcctgggacatcctgtcccctcagttcatgtacggctccaaggcctacgtgaagcaccccgccgacatccccgactacttgaagctgtccttccccgagggcttcaagtgggagcgcgtgatgaacttcgaggacggcggcgtggtgaccgtgacccaggactcctccctgcaggacggcgagttcatctacaaggtgaagctgcgcggcaccaacttcccctccgacggccccgtaatgcagaagaagaccatgggctgggaggcctcctccgagcggatgtaccccgaggacggcgccctgaagggcgagatcaagcagaggctgaagctgaaggacggcggccactacgacgctgaggtcaagaccacctacaaggccaagaagcccgtgcagctgcccggcgcctacaacgtcaacatcaagttggacatcacctcccacaacgaggactacaccatcgtggaacagtacgaacgcgccgagggccgccactccaccggcggcatggacgagctgtacaagtagtaa

SEQ ID NO: 239 - DNA, 4131 bp, Artificial Sequence
  chemically synthesized
atggactacaaagaccatgacggtgattataaagatcatgacatcgattacaaggatgacgatgacaagggcggagggatcactctcggcaaggacgagctgtaaggaggcaacatccccgctctggtggaaaaccagaagaagtactttggcacctacagcgtgatggccatgctgaacgctcagaccgtgctggaccacatccagaaggtggccgatattgagggcgagcagaacgagaacaacgagaatctgtggtttcaccccgtgatgagccacctgtacaacgccaagaacggctacgacaagcagcccgagaaaaccatgttcatcatcgagcggctgcagagctacttcccattcctgaagatcatggccgagaaccagagagagtacagcaacggcaagtacaagcagaaccgcgtggaagtgaacagcaacgacatcttcgaggtgctgaagcgcgccttcggcgtgctgaagatgtacagggacctgaccaacgcatacaagacctacgaggaaaagctgaacgacggctgcgagttcctgaccagcacagagcaacctctgagcggcatgatcaacaactactacacagtggccctgcggaacatgaacgagagatacggctacaagacagaggacctggccttcatccaggacaagcggttcaagttcgtgaaggacgcctacggcaagaaaaagtcccaagtgaataccggattcttcctgagcctgcaggactacaacggcgacacacagaagaagctgcacctgagcggagtgggaatcgccctgctgatctgcctgttcctggacaagcagtacatcaacatctttctgagcaggctgcccatcttctccagctacaatgcccagagcgaggaacggcggatcatcatcagatccttcggcatcaacagcatcaagctgcccaaggaccggatccacagcgagaagtccaacaagagcgtggccatggatatgctcaacgaagtgaagcggtgccccgacgagctgttcacaacactgtctgccgagaagcagtcccggttcagaatcatcagcgacgaccacaatgaagtgctgatgaagcggagcagcgacagattcgtgcctctgctgctgcagtatatcgattacggcaagctgttcgaccacatcaggttccacgtgaacatgggcaagctgagatacctgctgaaggccgacaagacctgcatcgacggccagaccagagtcagagtgatcgagcagcccctgaacggcttcggcagactggaagaggccgagacaatgcggaagcaagagaacggcaccttcggcaacagcggcatccggatcagagacttcgagaacatgaagcgggacgacgccaatcctgccaactatccctacatcgtggacacctacacacactacatcctggaaaacaacaaggtcgagatgtttatcaacgacaaagaggacagcgccccactgctgcccgtgatcgaggatgatagatacgtggtcaagacaatccccagctgccggatgagcaccctggaaattccagccatggccttccacatgtttctgttcggcagcaagaaaaccgagaagctgatcgtggacgtgcacaaccggtacaagagactgttccaggccatgcagaaagaagaagtgaccgccgagaatatcgccagcttcggaatcgccgagagcgacctgcctcagaagatcctggatctgatcagcggcaatgcccacggcaaggatgtggacgccttcatcagactgaccgtggacgacatgctgaccgacaccgagcggagaatcaagagattcaaggacgaccggaagtccattcggagcgccgacaacaagatgggaaagagaggcttcaagcagatctccacaggcaagctggccgacttcctggccaaggacatcgtgctgtttcagcccagcgtgaacgatggcgagaacaagatcaccggcctgaactaccggatcatgcagagcgccattgccgtgtacgatagcggcgacgattacgaggccaagcagcagttcaagctgatgttcgagaaggcccggctgatcggcaagggcacaacagagcctcatccatttctgtacaaggtgttcgcccgcagcatccccgccaatgccgtcgagttctacgagcgctacctgatcgagcggaagttctacctgaccggcctgtccaacgagatcaagaaaggcaacagagtggatgtgcccttcatccggcgggaccagaacaagtggaaaacacccgccatgaagaccctgggcagaatctacagcgaggatctgcccgtggaactgcccagacagatgttcgacaatgagatcaagtcccacctgaagtccctgccacagatggaaggcatcgacttcaacaatgccaacgtgacctatctgatcgccgagtacatgaagagagtgctggacgacgacttccagaccttctaccagtggaaccgcaactaccggtacatggacatgcttaagggcgagtacgacagaaagggctccctgcagcactgcttcaccagcgtggaagagagagaaggcctctggaaagagcgggcctccagaacagagcggtacagaaagcaggccagcaacaagatccgcagcaaccggcagatgagaaacgccagcagcgaagagatcgagacaatcctggataagcggctgagcaacagccggaacgagtaccagaaaagcgagaaagtgatccggcgctacagagtgcaggatgccctgctgtttctgctggccaaaaagaccctgaccgaactggccgatttcgacggcgagaggttcaaactgaaagaaatcatgcccgacgccgagaagggaatcctgagcgagatcatgcccatgagcttcaccttcgagaaaggcggcaagaagtacaccatcaccagcgagggcatgaagctgaagaactacggcgacttctttgtgctggctagcgacaagaggatcggcaacctgctggaactcgtgggcagcgacatcgtgtccaaagaggatatcatggaagagttcaacaaatacgaccagtgcaggcccgagatcagctccatcgtgttcaacctggaaaagtgggccttcgacacataccccgagctgtctgccagagtggaccgggaagagaaggtggacttcaagagcatcctgaaaatcctgctgaacaacaagaacatcaacaaagagcagagcgacatcctgcggaagatccggaacgccttcgatgcaaacaattaccccgacaaaggcgtggtggaaatcaaggccctgcctgagatcgccatgagcatcaagaaggcctttggggagtacgccatcatgaagtcgcgaggcggtggaggtagtggagggggaggatcaacgcgtgtgagcaagggcgaggaggataacatggccatcatcaaggagttcatgcgcttcaaggtgcacatggagggctccgtgaacggccacgagttcgagatcgagggcgagggcgagggccgcccctacgagggcacccagaccgccaagctgaaggtgaccaagggtggccccctgcccttcgcctgggacatcctgtcccctcagttcatgtacggctccaaggcctacgtgaagcaccccgccgacatccccgactacttgaagctgtccttccccgagggcttcaagtgggagcgcgtgatgaacttcgaggacggcggcgtggtgaccgtgacccaggactcctccctgcaggacggcgagttcatctacaaggtgaagctgcgcggcaccaacttcccctccgacggccccgtaatgcagaagaagaccatgggctgggaggcctcctccgagcggatgtaccccgaggacggcgccctgaagggcgagatcaagcagaggctgaagctgaaggacggcggccactacgacgctgaggtcaagaccacctacaaggccaagaagcccgtgcagctgcccggcgcctacaacgtcaacatcaagttggacatcacctcccacaacgaggactacaccatcgtggaacagtacgaacgcgccgagggccgccactccaccggcggcatggacgagctgtacaagtagtaa

SEQ ID NO: 240 - DNA, 4113 bp, Artificial Sequence
  chemically synthesized
atggactacaaagaccatgacggtgattataaagatcatgacatcgattacaaggatgacgatgacaagggcggatccaaattataaggaggcaacatccccgctctggtggaaaaccagaagaagtactttggcacctacagcgtgatggccatgctgaacgctcagaccgtgctggaccacatccagaaggtggccgatattgagggcgagcagaacgagaacaacgagaatctgtggtttcaccccgtgatgagccacctgtacaacgccaagaacggctacgacaagcagcccgagaaaaccatgttcatcatcgagcggctgcagagctacttcccattcctgaagatcatggccgagaaccagagagagtacagcaacggcaagtacaagcagaaccgcgtggaagtgaacagcaacgacatcttcgaggtgctgaagcgcgccttcggcgtgctgaagatgtacagggacctgaccaacgcatacaagacctacgaggaaaagctgaacgacggctgcgagttcctgaccagcacagagcaacctctgagcggcatgatcaacaactactacacagtggccctgcggaacatgaacgagagatacggctacaagacagaggacctggccttcatccaggacaagcggttcaagttcgtgaaggacgcctacggcaagaaaaagtcccaagtgaataccggattcttcctgagcctgcaggactacaacggcgacacacagaagaagctgcacctgagcggagtgggaatcgccctgctgatctgcctgttcctggacaagcagtacatcaacatctttctgagcaggctgcccatcttctccagctacaatgcccagagcgaggaacggcggatcatcatcagatccttcggcatcaacagcatcaagctgcccaaggaccggatccacagcgagaagtccaacaagagcgtggccatggatatgctcaacgaagtgaagcggtgccccgacgagctgttcacaacactgtctgccgagaagcagtcccggttcagaatcatcagcgacgaccacaatgaagtgctgatgaagcggagcagcgacagattcgtgcctctgctgctgcagtatatcgattacggcaagctgttcgaccacatcaggttccacgtgaacatgggcaagctgagatacctgctgaaggccgacaagacctgcatcgacggccagaccagagtcagagtgatcgagcagcccctgaacggcttcggcagactggaagaggccgagacaatgcggaagcaagagaacggcaccttcggcaacagcggcatccggatcagagacttcgagaacatgaagcgggacgacgccaatcctgccaactatccctacatcgtggacacctacacacactacatcctggaaaacaacaaggtcgagatgtttatcaacgacaaagaggacagcgccccactgctgcccgtgatcgaggatgatagatacgtggtcaagacaatccccagctgccggatgagcaccctggaaattccagccatggccttccacatgtttctgttcggcagcaagaaaaccgagaagctgatcgtggacgtgcacaaccggtacaagagactgttccaggccatgcagaaagaagaagtgaccgccgagaatatcgccagcttcggaatcgccgagagcgacctgcctcagaagatcctggatctgatcagcggcaatgcccacggcaaggatgtggacgccttcatcagactgaccgtggacgacatgctgaccgacaccgagcggagaatcaagagattcaaggacgaccggaagtccattcggagcgccgacaacaagatgggaaagagaggcttcaagcagatctccacaggcaagctggccgacttcctggccaaggacatcgtgctgtttcagcccagcgtgaacgatggcgagaacaagatcaccggcctgaactaccggatcatgcagagcgccattgccgtgtacgatagcggcgacgattacgaggccaagcagcagttcaagctgatgttcgagaaggcccggctgatcggcaagggcacaacagagcctcatccatttctgtacaaggtgttcgcccgcagcatccccgccaatgccgtcgagttctacgagcgctacctgatcgagcggaagttctacctgaccggcctgtccaacgagatcaagaaaggcaacagagtggatgtgcccttcatccggcgggaccagaacaagtggaaaacacccgccatgaagaccctgggcagaatctacagcgaggatctgcccgtggaactgcccagacagatgttcgacaatgagatcaagtcccacctgaagtccctgccacagatggaaggcatcgacttcaacaatgccaacgtgacctatctgatcgccgagtacatgaagagagtgctggacgacgacttccagaccttctaccagtggaaccgcaactaccggtacatggacatgcttaagggcgagtacgacagaaagggctccctgcagcactgcttcaccagcgtggaagagagagaaggcctctggaaagagcgggcctccagaacagagcggtacagaaagcaggccagcaacaagatccgcagcaaccggcagatgagaaacgccagcagcgaagagatcgagacaatcctggataagcggctgagcaacagccggaacgagtaccagaaaagcgagaaagtgatccggcgctacagagtgcaggatgccctgctgtttctgctggccaaaaagaccctgaccgaactggccgatttcgacggcgagaggttcaaactgaaagaaatcatgcccgacgccgagaagggaatcctgagcgagatcatgcccatgagcttcaccttcgagaaaggcggcaagaagtacaccatcaccagcgagggcatgaagctgaagaactacggcgacttctttgtgctggctagcgacaagaggatcggcaacctgctggaactcgtgggcagcgacatcgtgtccaaagaggatatcatggaagagttcaacaaatacgaccagtgcaggcccgagatcagctccatcgtgttcaacctggaaaagtgggccttcgacacataccccgagctgtctgccagagtggaccgggaagagaaggtggacttcaagagcatcctgaaaatcctgctgaacaacaagaacatcaacaaagagcagagcgacatcctgcggaagatccggaacgccttcgatgcaaacaattaccccgacaaaggcgtggtggaaatcaaggccctgcctgagatcgccatgagcatcaagaaggcctttggggagtacgccatcatgaagtcgcgaggcggtggaggtagtggagggggaggatcaacgcgtgtgagcaagggcgaggaggataacatggccatcatcaaggagttcatgcgcttcaaggtgcacatggagggctccgtgaacggccacgagttcgagatcgagggcgagggcgagggccgcccctacgagggcacccagaccgccaagctgaaggtgaccaagggtggccccctgcccttcgcctgggacatcctgtcccctcagttcatgtacggctccaaggcctacgtgaagcaccccgccgacatccccgactacttgaagctgtccttccccgagggcttcaagtgggagcgcgtgatgaacttcgaggacggcggcgtggtgaccgtgacccaggactcctccctgcaggacggcgagttcatctacaaggtgaagctgcgcggcaccaacttcccctccgacggccccgtaatgcagaagaagaccatgggctgggaggcctcctccgagcggatgtaccccgaggacggcgccctgaagggcgagatcaagcagaggctgaagctgaaggacggcggccactacgacgctgaggtcaagaccacctacaaggccaagaagcccgtgcagctgcccggcgcctacaacgtcaacatcaagttggacatcacctcccacaacgaggactacaccatcgtggaacagtacgaacgcgccgagggccgccactccaccggcggcatggacgagctgtacaagtagtaa

SEQ ID NO: 241 - DNA, 3897 bp, Artificial Sequence
  chemically synthesized
atggactacaaagaccatgacggtgattataaagatcatgacatcgattacaaggatgacgatgacaagggcggaaactcaaagaaaaggtcactggaggacaacgaaacggaaatcaaagtctccagagacacctggaacactaagaacatgcggtccctggaaccgccacgaagcaagaaacggatacatggaggcaacatccccgctctggtggaaaaccagaagaagtactttggcacctacagcgtgatggccatgctgaacgctcagaccgtgctggaccacatccagaaggtggccgatattgagggcgagcagaacgagaacaacgagaatctgtggtttcaccccgtgatgagccacctgtacaacgccaagaacggctacgacaagcagcccgagaaaaccatgttcatcatcgagcggctgcagagctacttcccattcctgaagatcatggccgagaaccagagagagtacagcaacggcaagtacaagcagaaccgcgtggaagtgaacagcaacgacatcttcgaggtgctgaagcgcgccttcggcgtgctgaagatgtacagggacctgaccaacgcatacaagacctacgaggaaaagctgaacgacggctgcgagttcctgaccagcacagagcaacctctgagcggcatgatcaacaactactacacagtggccctgcggaacatgaacgagagatacggctacaagacagaggacctggccttcatccaggacaagcggttcaagttcgtgaaggacgcctacggcaagaaaaagtcccaagtgaataccggattcttcctgagcctgcaggactacaacggcgacacacagaagaagctgcacctgagcggagtgggaatcgccctgctgatctgcctgttcctggacaagcagtacatcaacatctttctgagcaggctgcccatcttctccagctacaatgcccagagcgaggaacggcggatcatcatcagatccttcggcatcaacagcatcaagctgcccaaggaccggatccacagcgagaagtccaacaagagcgtggccatggatatgctcaacgaagtgaagcggtgccccgacgagctgttcacaacactgtctgccgagaagcagtcccggttcagaatcatcagcgacgaccacaatgaagtgctgatgaagcggagcagcgacagattcgtgcctctgctgctgcagtatatcgattacggcaagctgttcgaccacatcaggttccacgtgaacatgggcaagctgagatacctgctgaaggccgacaagacctgcatcgacggccagaccagagtcagagtgatcgagcagcccctgaacggcttcggcagactggaagaggccgagacaatgcggaagcaagagaacggcaccttcggcaacagcggcatccggatcagagacttcgagaacatgaagcgggacgacgccaatcctgccaactatccctacatcgtggacacctacacacactacatcctggaaaacaacaaggtcgagatgtttatcaacgacaaagaggacagcgccccactgctgcccgtgatcgaggatgatagatacgtggtcaagacaatccccagctgccggatgagcaccctggaaattccagccatggccttccacatgtttctgttcggcagcaagaaaaccgagaagctgatcgtggacgtgcacaaccggtacaagagactgttccaggccatgcagaaagaagaagtgaccgccgagaatatcgccagcttcggaatcgccgagagcgacctgcctcagaagatcctggatctgatcagcggcaatgcccacggcaaggatgtggacgccttcatcagactgaccgtggacgacatgctgaccgacaccgagcggagaatcaagagattcaaggacgaccggaagtccattcggagcgccgacaacaagatgggaaagagaggcttcaagcagatctccacaggcaagctggccgacttcctggccaaggacatcgtgctgtttcagcccagcgtgaacgatggcgagaacaagatcaccggcctgaactaccggatcatgcagagcgccattgccgtgtacgatagcggcgacgattacgaggccaagcagcagttcaagctgatgttcgagaaggcccggctgatcggcaagggcacaacagagcctcatccatttctgtacaaggtgttcgcccgcagcatccccgccaatgccgtcgagttctacgagcgctacctgatcgagcggaagttctacctgaccggcctgtccaacgagatcaagaaaggcaacagagtggatgtgcccttcatccggcgggaccagaacaagtggaaaacacccgccatgaagaccctgggcagaatctacagcgaggatctgcccgtggaactgcccagacagatgttcgacaatgagatcaagtcccacctgaagtccctgccacagatggaaggcatcgacttcaacaatgccaacgtgacctatctgatcgccgagtacatgaagagagtgctggacgacgacttccagaccttctaccagtggaaccgcaactaccggtacatggacatgcttaagggcgagtacgacagaaagggctccctgcagcactgcttcaccagcgtggaagagagagaaggcctctggaaagagcgggcctccagaacagagcggtacagaaagcaggccagcaacaagatccgcagcaaccggcagatgagaaacgccagcagcgaagagatcgagacaatcctggataagcggctgagcaacagccggaacgagtaccagaaaagcgagaaagtgatccggcgctacagagtgcaggatgccctgctgtttctgctggccaaaaagaccctgaccgaactggccgatttcgacggcgagaggttcaaactgaaagaaatcatgcccgacgccgagaagggaatcctgagcgagatcatgcccatgagcttcaccttcgagaaaggcggcaagaagtacaccatcaccagcgagggcatgaagctgaagaactacggcgacttctttgtgctggctagcgacaagaggatcggcaacctgctggaactcgtgggcagcgacatcgtgtccaaagaggattcgcgaggcggtggaggtagtggagggggaggatcaacgcgtgtgagcaagggcgaggaggataacatggccatcatcaaggagttcatgcgcttcaaggtgcacatggagggctccgtgaacggccacgagttcgagatcgagggcgagggcgagggccgcccctacgagggcacccagaccgccaagctgaaggtgaccaagggtggccccctgcccttcgcctgggacatcctgtcccctcagttcatgtacggctccaaggcctacgtgaagcaccccgccgacatccccgactacttgaagctgtccttccccgagggcttcaagtgggagcgcgtgatgaacttcgaggacggcggcgtggtgaccgtgacccaggactcctccctgcaggacggcgagttcatctacaaggtgaagctgcgcggcaccaacttcccctccgacggccccgtaatgcagaagaagaccatgggctgggaggcctcctccgagcggatgtaccccgaggacggcgccctgaagggcgagatcaagcagaggctgaagctgaaggacggcggccactacgacgctgaggtcaagaccacctacaaggccaagaagcccgtgcagctgcccggcgcctacaacgtcaacatcaagttggacatcacctcccacaacgaggactacaccatcgtggaacagtacgaacgcgccgagggccgccactccaccggcggcatggacgagctgtacaagtagtaa

SEQ ID NO: 242 - DNA, 3813 bp, Artificial Sequence
  chemically synthesized
atggactacaaagaccatgacggtgattataaagatcatgacatcgattacaaggatgacgatgacaagggcggacttcaactgcctccacttgaaagactgacactgggaggcaacatccccgctctggtggaaaaccagaagaagtactttggcacctacagcgtgatggccatgctgaacgctcagaccgtgctggaccacatccagaaggtggccgatattgagggcgagcagaacgagaacaacgagaatctgtggtttcaccccgtgatgagccacctgtacaacgccaagaacggctacgacaagcagcccgagaaaaccatgttcatcatcgagcggctgcagagctacttcccattcctgaagatcatggccgagaaccagagagagtacagcaacggcaagtacaagcagaaccgcgtggaagtgaacagcaacgacatcttcgaggtgctgaagcgcgccttcggcgtgctgaagatgtacagggacctgaccaacgcatacaagacctacgaggaaaagctgaacgacggctgcgagttcctgaccagcacagagcaacctctgagcggcatgatcaacaactactacacagtggccctgcggaacatgaacgagagatacggctacaagacagaggacctggccttcatccaggacaagcggttcaagttcgtgaaggacgcctacggcaagaaaaagtcccaagtgaataccggattcttcctgagcctgcaggactacaacggcgacacacagaagaagctgcacctgagcggagtgggaatcgccctgctgatctgcctgttcctggacaagcagtacatcaacatctttctgagcaggctgcccatcttctccagctacaatgcccagagcgaggaacggcggatcatcatcagatccttcggcatcaacagcatcaagctgcccaaggaccggatccacagcgagaagtccaacaagagcgtggccatggatatgctcaacgaagtgaagcggtgccccgacgagctgttcacaacactgtctgccgagaagcagtcccggttcagaatcatcagcgacgaccacaatgaagtgctgatgaagcggagcagcgacagattcgtgcctctgctgctgcagtatatcgattacggcaagctgttcgaccacatcaggttccacgtgaacatgggcaagctgagatacctgctgaaggccgacaagacctgcatcgacggccagaccagagtcagagtgatcgagcagcccctgaacggcttcggcagactggaagaggccgagacaatgcggaagcaagagaacggcaccttcggcaacagcggcatccggatcagagacttcgagaacatgaagcgggacgacgccaatcctgccaactatccctacatcgtggacacctacacacactacatcctggaaaacaacaaggtcgagatgtttatcaacgacaaagaggacagcgccccactgctgcccgtgatcgaggatgatagatacgtggtcaagacaatccccagctgccggatgagcaccctggaaattccagccatggccttccacatgtttctgttcggcagcaagaaaaccgagaagctgatcgtggacgtgcacaaccggtacaagagactgttccaggccatgcagaaagaagaagtgaccgccgagaatatcgccagcttcggaatcgccgagagcgacctgcctcagaagatcctggatctgatcagcggcaatgcccacggcaaggatgtggacgccttcatcagactgaccgtggacgacatgctgaccgacaccgagcggagaatcaagagattcaaggacgaccggaagtccattcggagcgccgacaacaagatgggaaagagaggcttcaagcagatctccacaggcaagctggccgacttcctggccaaggacatcgtgctgtttcagcccagcgtgaacgatggcgagaacaagatcaccggcctgaactaccggatcatgcagagcgccattgccgtgtacgatagcggcgacgattacgaggccaagcagcagttcaagctgatgttcgagaaggcccggctgatcggcaagggcacaacagagcctcatccatttctgtacaaggtgttcgcccgcagcatccccgccaatgccgtcgagttctacgagcgctacctgatcgagcggaagttctacctgaccggcctgtccaacgagatcaagaaaggcaacagagtggatgtgcccttcatccggcgggaccagaacaagtggaaaacacccgccatgaagaccctgggcagaatctacagcgaggatctgcccgtggaactgcccagacagatgttcgacaatgagatcaagtcccacctgaagtccctgccacagatggaaggcatcgacttcaacaatgccaacgtgacctatctgatcgccgagtacatgaagagagtgctggacgacgacttccagaccttctaccagtggaaccgcaactaccggtacatggacatgcttaagggcgagtacgacagaaagggctccctgcagcactgcttcaccagcgtggaagagagagaaggcctctggaaagagcgggcctccagaacagagcggtacagaaagcaggccagcaacaagatccgcagcaaccggcagatgagaaacgccagcagcgaagagatcgagacaatcctggataagcggctgagcaacagccggaacgagtaccagaaaagcgagaaagtgatccggcgctacagagtgcaggatgccctgctgtttctgctggccaaaaagaccctgaccgaactggccgatttcgacggcgagaggttcaaactgaaagaaatcatgcccgacgccgagaagggaatcctgagcgagatcatgcccatgagcttcaccttcgagaaaggcggcaagaagtacaccatcaccagcgagggcatgaagctgaagaactacggcgacttctttgtgctggctagcgacaagaggatcggcaacctgctggaactcgtgggcagcgacatcgtgtccaaagaggattcgcgaggcggtggaggtagtggagggggaggatcaacgcgtgtgagcaagggcgaggaggataacatggccatcatcaaggagttcatgcgcttcaaggtgcacatggagggctccgtgaacggccacgagttcgagatcgagggcgagggcgagggccgcccctacgagggcacccagaccgccaagctgaaggtgaccaagggtggccccctgcccttcgcctgggacatcctgtcccctcagttcatgtacggctccaaggcctacgtgaagcaccccgccgacatccccgactacttgaagctgtccttccccgagggcttcaagtgggagcgcgtgatgaacttcgaggacggcggcgtggtgaccgtgacccaggactcctccctgcaggacggcgagttcatctacaaggtgaagctgcgcggcaccaacttcccctccgacggccccgtaatgcagaagaagaccatgggctgggaggcctcctccgagcggatgtaccccgaggacggcgccctgaagggcgagatcaagcagaggctgaagctgaaggacggcggccactacgacgctgaggtcaagaccacctacaaggccaagaagcccgtgcagctgcccggcgcctacaacgtcaacatcaagttggacatcacctcccacaacgaggactacaccatcgtggaacagtacgaacgcgccgagggccgccactccaccggcggcatggacgagctgtacaagtagtaa

SEQ ID NO: 243 - DNA, 3828 bp, Artificial Sequence
  chemically synthesized
atggactacaaagaccatgacggtgattataaagatcatgacatcgattacaaggatgacgatgacaagggcggaggatcccttcaactgcctccacttgaaagactgacactgggtagttccggaggcaacatccccgctctggtggaaaaccagaagaagtactttggcacctacagcgtgatggccatgctgaacgctcagaccgtgctggaccacatccagaaggtggccgatattgagggcgagcagaacgagaacaacgagaatctgtggtttcaccccgtgatgagccacctgtacaacgccaagaacggctacgacaagcagcccgagaaaaccatgttcatcatcgagcggctgcagagctacttcccattcctgaagatcatggccgagaaccagagagagtacagcaacggcaagtacaagcagaaccgcgtggaagtgaacagcaacgacatcttcgaggtgctgaagcgcgccttcggcgtgctgaagatgtacagggacctgaccaacgcatacaagacctacgaggaaaagctgaacgacggctgcgagttcctgaccagcacagagcaacctctgagcggcatgatcaacaactactacacagtggccctgcggaacatgaacgagagatacggctacaagacagaggacctggccttcatccaggacaagcggttcaagttcgtgaaggacgcctacggcaagaaaaagtcccaagtgaataccggattcttcctgagcctgcaggactacaacggcgacacacagaagaagctgcacctgagcggagtgggaatcgccctgctgatctgcctgttcctggacaagcagtacatcaacatctttctgagcaggctgcccatcttctccagctacaatgcccagagcgaggaacggcggatcatcatcagatccttcggcatcaacagcatcaagctgcccaaggaccggatccacagcgagaagtccaacaagagcgtggccatggatatgctcaacgaagtgaagcggtgccccgacgagctgttcacaacactgtctgccgagaagcagtcccggttcagaatcatcagcgacgaccacaatgaagtgctgatgaagcggagcagcgacagattcgtgcctctgctgctgcagtatatcgattacggcaagctgttcgaccacatcaggttccacgtgaacatgggcaagctgagatacctgctgaaggccgacaagacctgcatcgacggccagaccagagtcagagtgatcgagcagcccctgaacggcttcggcagactggaagaggccgagacaatgcggaagcaagagaacggcaccttcggcaacagcggcatccggatcagagacttcgagaacatgaagcgggacgacgccaatcctgccaactatccctacatcgtggacacctacacacactacatcctggaaaacaacaaggtcgagatgtttatcaacgacaaagaggacagcgccccactgctgcccgtgatcgaggatgatagatacgtggtcaagacaatccccagctgccggatgagcaccctggaaattccagccatggccttccacatgtttctgttcggcagcaagaaaaccgagaagctgatcgtggacgtgcacaaccggtacaagagactgttccaggccatgcagaaagaagaagtgaccgccgagaatatcgccagcttcggaatcgccgagagcgacctgcctcagaagatcctggatctgatcagcggcaatgcccacggcaaggatgtggacgccttcatcagactgaccgtggacgacatgctgaccgacaccgagcggagaatcaagagattcaaggacgaccggaagtccattcggagcgccgacaacaagatgggaaagagaggcttcaagcagatctccacaggcaagctggccgacttcctggccaaggacatcgtgctgtttcagcccagcgtgaacgatggcgagaacaagatcaccggcctgaactaccggatcatgcagagcgccattgccgtgtacgatagcggcgacgattacgaggccaagcagcagttcaagctgatgttcgagaaggcccggctgatcggcaagggcacaacagagcctcatccatttctgtacaaggtgttcgcccgcagcatccccgccaatgccgtcgagttctacgagcgctacctgatcgagcggaagttctacctgaccggcctgtccaacgagatcaagaaaggcaacagagtggatgtgcccttcatccggcgggaccagaacaagtggaaaacacccgccatgaagaccctgggcagaatctacagcgaggatctgcccgtggaactgcccagacagatgttcgacaatgagatcaagtcccacctgaagtccctgccacagatggaaggcatcgacttcaacaatgccaacgtgacctatctgatcgccgagtacatgaagagagtgctggacgacgacttccagaccttctaccagtggaaccgcaactaccggtacatggacatgcttaagggcgagtacgacagaaagggctccctgcagcactgcttcaccagcgtggaagagagagaaggcctctggaaagagcgggcctccagaacagagcggtacagaaagcaggccagcaacaagatccgcagcaaccggcagatgagaaacgccagcagcgaagagatcgagacaatcctggataagcggctgagcaacagccggaacgagtaccagaaaagcgagaaagtgatccggcgctacagagtgcaggatgccctgctgtttctgctggccaaaaagaccctgaccgaactggccgatttcgacggcgagaggttcaaactgaaagaaatcatgcccgacgccgagaagggaatcctgagcgagatcatgcccatgagcttcaccttcgagaaaggcggcaagaagtacaccatcaccagcgagggcatgaagctgaagaactacggcgacttctttgtgctggctagcgacaagaggatcggcaacctgctggaactcgtgggcagcgacatcgtgtccaaagaggattcgcgaggcggtggaggtagtggagggggaggatcaacgcgtgtgagcaagggcgaggaggataacatggccatcatcaaggagttcatgcgcttcaaggtgcacatggagggctccgtgaacggccacgagttcgagatcgagggcgagggcgagggccgcccctacgagggcacccagaccgccaagctgaaggtgaccaagggtggccccctgcccttcgcctgggacatcctgtcccctcagttcatgtacggctccaaggcctacgtgaagcaccccgccgacatccccgactacttgaagctgtccttccccgagggcttcaagtgggagcgcgtgatgaacttcgaggacggcggcgtggtgaccgtgacccaggactcctccctgcaggacggcgagttcatctacaaggtgaagctgcgcggcaccaacttcccctccgacggccccgtaatgcagaagaagaccatgggctgggaggcctcctccgagcggatgtaccccgaggacggcgccctgaagggcgagatcaagcagaggctgaagctgaaggacggcggccactacgacgctgaggtcaagaccacctacaaggccaagaagcccgtgcagctgcccggcgcctacaacgtcaacatcaagttggacatcacctcccacaacgaggactacaccatcgtggaacagtacgaacgcgccgagggccgccactccaccggcggcatggacgagctgtacaagtagtaa

SEQ ID NO: 244 - DNA, 3876 bp, Artificial Sequence
  chemically synthesized
atggactacaaagaccatgacggtgattataaagatcatgacatcgattacaaggatgacgatgacaagggcggaatgagtgtgttgacgccgttgcttctgcgagggcttaccgggtctgctagaagacttccggtccccagggccaagatacatagcctcggagacccgggaggcaacatccccgctctggtggaaaaccagaagaagtactttggcacctacagcgtgatggccatgctgaacgctcagaccgtgctggaccacatccagaaggtggccgatattgagggcgagcagaacgagaacaacgagaatctgtggtttcaccccgtgatgagccacctgtacaacgccaagaacggctacgacaagcagcccgagaaaaccatgttcatcatcgagcggctgcagagctacttcccattcctgaagatcatggccgagaaccagagagagtacagcaacggcaagtacaagcagaaccgcgtggaagtgaacagcaacgacatcttcgaggtgctgaagcgcgccttcggcgtgctgaagatgtacagggacctgaccaacgcatacaagacctacgaggaaaagctgaacgacggctgcgagttcctgaccagcacagagcaacctctgagcggcatgatcaacaactactacacagtggccctgcggaacatgaacgagagatacggctacaagacagaggacctggccttcatccaggacaagcggttcaagttcgtgaaggacgcctacggcaagaaaaagtcccaagtgaataccggattcttcctgagcctgcaggactacaacggcgacacacagaagaagctgcacctgagcggagtgggaatcgccctgctgatctgcctgttcctggacaagcagtacatcaacatctttctgagcaggctgcccatcttctccagctacaatgcccagagcgaggaacggcggatcatcatcagatccttcggcatcaacagcatcaagctgcccaaggaccggatccacagcgagaagtccaacaagagcgtggccatggatatgctcaacgaagtgaagcggtgccccgacgagctgttcacaacactgtctgccgagaagcagtcccggttcagaatcatcagcgacgaccacaatgaagtgctgatgaagcggagcagcgacagattcgtgcctctgctgctgcagtatatcgattacggcaagctgttcgaccacatcaggttccacgtgaacatgggcaagctgagatacctgctgaaggccgacaagacctgcatcgacggccagaccagagtcagagtgatcgagcagcccctgaacggcttcggcagactggaagaggccgagacaatgcggaagcaagagaacggcaccttcggcaacagcggcatccggatcagagacttcgagaacatgaagcgggacgacgccaatcctgccaactatccctacatcgtggacacctacacacactacatcctggaaaacaacaaggtcgagatgtttatcaacgacaaagaggacagcgccccactgctgcccgtgatcgaggatgatagatacgtggtcaagacaatccccagctgccggatgagcaccctggaaattccagccatggccttccacatgtttctgttcggcagcaagaaaaccgagaagctgatcgtggacgtgcacaaccggtacaagagactgttccaggccatgcagaaagaagaagtgaccgccgagaatatcgccagcttcggaatcgccgagagcgacctgcctcagaagatcctggatctgatcagcggcaatgcccacggcaaggatgtggacgccttcatcagactgaccgtggacgacatgctgaccgacaccgagcggagaatcaagagattcaaggacgaccggaagtccattcggagcgccgacaacaagatgggaaagagaggcttcaagcagatctccacaggcaagctggccgacttcctggccaaggacatcgtgctgtttcagcccagcgtgaacgatggcgagaacaagatcaccggcctgaactaccggatcatgcagagcgccattgccgtgtacgatagcggcgacgattacgaggccaagcagcagttcaagctgatgttcgagaaggcccggctgatcggcaagggcacaacagagcctcatccatttctgtacaaggtgttcgcccgcagcatccccgccaatgccgtcgagttctacgagcgctacctgatcgagcggaagttctacctgaccggcctgtccaacgagatcaagaaaggcaacagagtggatgtgcccttcatccggcgggaccagaacaagtggaaaacacccgccatgaagaccctgggcagaatctacagcgaggatctgcccgtggaactgcccagacagatgttcgacaatgagatcaagtcccacctgaagtccctgccacagatggaaggcatcgacttcaacaatgccaacgtgacctatctgatcgccgagtacatgaagagagtgctggacgacgacttccagaccttctaccagtggaaccgcaactaccggtacatggacatgcttaagggcgagtacgacagaaagggctccctgcagcactgcttcaccagcgtggaagagagagaaggcctctggaaagagcgggcctccagaacagagcggtacagaaagcaggccagcaacaagatccgcagcaaccggcagatgagaaacgccagcagcgaagagatcgagacaatcctggataagcggctgagcaacagccggaacgagtaccagaaaagcgagaaagtgatccggcgctacagagtgcaggatgccctgctgtttctgctggccaaaaagaccctgaccgaactggccgatttcgacggcgagaggttcaaactgaaagaaatcatgcccgacgccgagaagggaatcctgagcgagatcatgcccatgagcttcaccttcgagaaaggcggcaagaagtacaccatcaccagcgagggcatgaagctgaagaactacggcgacttctttgtgctggctagcgacaagaggatcggcaacctgctggaactcgtgggcagcgacatcgtgtccaaagaggattcgcgaggcggtggaggtagtggagggggaggatcaacgcgtgtgagcaagggcgaggaggataacatggccatcatcaaggagttcatgcgcttcaaggtgcacatggagggctccgtgaacggccacgagttcgagatcgagggcgagggcgagggccgcccctacgagggcacccagaccgccaagctgaaggtgaccaagggtggccccctgcccttcgcctgggacatcctgtcccctcagttcatgtacggctccaaggcctacgtgaagcaccccgccgacatccccgactacttgaagctgtccttccccgagggcttcaagtgggagcgcgtgatgaacttcgaggacggcggcgtggtgaccgtgacccaggactcctccctgcaggacggcgagttcatctacaaggtgaagctgcgcggcaccaacttcccctccgacggccccgtaatgcagaagaagaccatgggctgggaggcctcctccgagcggatgtaccccgaggacggcgccctgaagggcgagatcaagcagaggctgaagctgaaggacggcggccactacgacgctgaggtcaagaccacctacaaggccaagaagcccgtgcagctgcccggcgcctacaacgtcaacatcaagttggacatcacctcccacaacgaggactacaccatcgtggaacagtacgaacgcgccgagggccgccactccaccggcggcatggacgagctgtacaagtagtaa

SEQ ID NO: 245 - DNA, 4170 bp, Artificial Sequence
  chemically synthesized
atggactacaaagaccatgacggtgattataaagatcatgacatcgattacaaggatgacgatgacaagggcggaatgagtgtgttgacgccgttgcttctgcgagggcttaccgggtctgctagaagacttccggtccccagggccaagatacatagcctcggagacccgatgtctgtgctcactcctctgcttttgcgaggactgactgggtccgccagacgactcccggtgccgagagctaaaatccatagcctgggaaaattggcaactatgtcagtcctgacgccgcttcttctccggggtcttacagggtctgcaagaaggctgcctgtacctcgggcgaaaattcatagcttgggcgacccgatgagtgtattgacgcccctgttgctgagaggattgactgggtcagcgcgccggctccctgtcccccgagctaagattcactcccttggtaagctgggaggcaacatccccgctctggtggaaaaccagaagaagtactttggcacctacagcgtgatggccatgctgaacgctcagaccgtgctggaccacatccagaaggtggccgatattgagggcgagcagaacgagaacaacgagaatctgtggtttcaccccgtgatgagccacctgtacaacgccaagaacggctacgacaagcagcccgagaaaaccatgttcatcatcgagcggctgcagagctacttcccattcctgaagatcatggccgagaaccagagagagtacagcaacggcaagtacaagcagaaccgcgtggaagtgaacagcaacgacatcttcgaggtgctgaagcgcgccttcggcgtgctgaagatgtacagggacctgaccaacgcatacaagacctacgaggaaaagctgaacgacggctgcgagttcctgaccagcacagagcaacctctgagcggcatgatcaacaactactacacagtggccctgcggaacatgaacgagagatacggctacaagacagaggacctggccttcatccaggacaagcggttcaagttcgtgaaggacgcctacggcaagaaaaagtcccaagtgaataccggattcttcctgagcctgcaggactacaacggcgacacacagaagaagctgcacctgagcggagtgggaatcgccctgctgatctgcctgttcctggacaagcagtacatcaacatctttctgagcaggctgcccatcttctccagctacaatgcccagagcgaggaacggcggatcatcatcagatccttcggcatcaacagcatcaagctgcccaaggaccggatccacagcgagaagtccaacaagagcgtggccatggatatgctcaacgaagtgaagcggtgccccgacgagctgttcacaacactgtctgccgagaagcagtcccggttcagaatcatcagcgacgaccacaatgaagtgctgatgaagcggagcagcgacagattcgtgcctctgctgctgcagtatatcgattacggcaagctgttcgaccacatcaggttccacgtgaacatgggcaagctgagatacctgctgaaggccgacaagacctgcatcgacggccagaccagagtcagagtgatcgagcagcccctgaacggcttcggcagactggaagaggccgagacaatgcggaagcaagagaacggcaccttcggcaacagcggcatccggatcagagacttcgagaacatgaagcgggacgacgccaatcctgccaactatccctacatcgtggacacctacacacactacatcctggaaaacaacaaggtcgagatgtttatcaacgacaaagaggacagcgccccactgctgcccgtgatcgaggatgatagatacgtggtcaagacaatccccagctgccggatgagcaccctggaaattccagccatggccttccacatgtttctgttcggcagcaagaaaaccgagaagctgatcgtggacgtgcacaaccggtacaagagactgttccaggccatgcagaaagaagaagtgaccgccgagaatatcgccagcttcggaatcgccgagagcgacctgcctcagaagatcctggatctgatcagcggcaatgcccacggcaaggatgtggacgccttcatcagactgaccgtggacgacatgctgaccgacaccgagcggagaatcaagagattcaaggacgaccggaagtccattcggagcgccgacaacaagatgggaaagagaggcttcaagcagatctccacaggcaagctggccgacttcctggccaaggacatcgtgctgtttcagcccagcgtgaacgatggcgagaacaagatcaccggcctgaactaccggatcatgcagagcgccattgccgtgtacgatagcggcgacgattacgaggccaagcagcagttcaagctgatgttcgagaaggcccggctgatcggcaagggcacaacagagcctcatccatttctgtacaaggtgttcgcccgcagcatccccgccaatgccgtcgagttctacgagcgctacctgatcgagcggaagttctacctgaccggcctgtccaacgagatcaagaaaggcaacagagtggatgtgcccttcatccggcgggaccagaacaagtggaaaacacccgccatgaagaccctgggcagaatctacagcgaggatctgcccgtggaactgcccagacagatgttcgacaatgagatcaagtcccacctgaagtccctgccacagatggaaggcatcgacttcaacaatgccaacgtgacctatctgatcgccgagtacatgaagagagtgctggacgacgacttccagaccttctaccagtggaaccgcaactaccggtacatggacatgcttaagggcgagtacgacagaaagggctccctgcagcactgcttcaccagcgtggaagagagagaaggcctctggaaagagcgggcctccagaacagagcggtacagaaagcaggccagcaacaagatccgcagcaaccggcagatgagaaacgccagcagcgaagagatcgagacaatcctggataagcggctgagcaacagccggaacgagtaccagaaaagcgagaaagtgatccggcgctacagagtgcaggatgccctgctgtttctgctggccaaaaagaccctgaccgaactggccgatttcgacggcgagaggttcaaactgaaagaaatcatgcccgacgccgagaagggaatcctgagcgagatcatgcccatgagcttcaccttcgagaaaggcggcaagaagtacaccatcaccagcgagggcatgaagctgaagaactacggcgacttctttgtgctggctagcgacaagaggatcggcaacctgctggaactcgtgggcagcgacatcgtgtccaaagaggattcgcgaggcggtggaggtagtggagggggaggatcaacgcgtgtgagcaagggcgaggaggataacatggccatcatcaaggagttcatgcgcttcaaggtgcacatggagggctccgtgaacggccacgagttcgagatcgagggcgagggcgagggccgcccctacgagggcacccagaccgccaagctgaaggtgaccaagggtggccccctgcccttcgcctgggacatcctgtcccctcagttcatgtacggctccaaggcctacgtgaagcaccccgccgacatccccgactacttgaagctgtccttccccgagggcttcaagtgggagcgcgtgatgaacttcgaggacggcggcgtggtgaccgtgacccaggactcctccctgcaggacggcgagttcatctacaaggtgaagctgcgcggcaccaacttcccctccgacggccccgtaatgcagaagaagaccatgggctgggaggcctcctccgagcggatgtaccccgaggacggcgccctgaagggcgagatcaagcagaggctgaagctgaaggacggcggccactacgacgctgaggtcaagaccacctacaaggccaagaagcccgtgcagctgcccggcgcctacaacgtcaacatcaagttggacatcacctcccacaacgaggactacaccatcgtggaacagtacgaacgcgccgagggccgccactccaccggcggcatggacgagctgtacaagtagtaa

SEQ ID NO: 246 - DNA, 3840 bp, Artificial Sequence
  chemically synthesized
atggactacaaagaccatgacggtgattataaagatcatgacatcgattacaaggatgacgatgacaagggcggaatgtacaggatgcaactcctgtcttgcattgcactaagtcttgcacttgtcacgaattccggaggcaacatccccgctctggtggaaaaccagaagaagtactttggcacctacagcgtgatggccatgctgaacgctcagaccgtgctggaccacatccagaaggtggccgatattgagggcgagcagaacgagaacaacgagaatctgtggtttcaccccgtgatgagccacctgtacaacgccaagaacggctacgacaagcagcccgagaaaaccatgttcatcatcgagcggctgcagagctacttcccattcctgaagatcatggccgagaaccagagagagtacagcaacggcaagtacaagcagaaccgcgtggaagtgaacagcaacgacatcttcgaggtgctgaagcgcgccttcggcgtgctgaagatgtacagggacctgaccaacgcatacaagacctacgaggaaaagctgaacgacggctgcgagttcctgaccagcacagagcaacctctgagcggcatgatcaacaactactacacagtggccctgcggaacatgaacgagagatacggctacaagacagaggacctggccttcatccaggacaagcggttcaagttcgtgaaggacgcctacggcaagaaaaagtcccaagtgaataccggattcttcctgagcctgcaggactacaacggcgacacacagaagaagctgcacctgagcggagtgggaatcgccctgctgatctgcctgttcctggacaagcagtacatcaacatctttctgagcaggctgcccatcttctccagctacaatgcccagagcgaggaacggcggatcatcatcagatccttcggcatcaacagcatcaagctgcccaaggaccggatccacagcgagaagtccaacaagagcgtggccatggatatgctcaacgaagtgaagcggtgccccgacgagctgttcacaacactgtctgccgagaagcagtcccggttcagaatcatcagcgacgaccacaatgaagtgctgatgaagcggagcagcgacagattcgtgcctctgctgctgcagtatatcgattacggcaagctgttcgaccacatcaggttccacgtgaacatgggcaagctgagatacctgctgaaggccgacaagacctgcatcgacggccagaccagagtcagagtgatcgagcagcccctgaacggcttcggcagactggaagaggccgagacaatgcggaagcaagagaacggcaccttcggcaacagcggcatccggatcagagacttcgagaacatgaagcgggacgacgccaatcctgccaactatccctacatcgtggacacctacacacactacatcctggaaaacaacaaggtcgagatgtttatcaacgacaaagaggacagcgccccactgctgcccgtgatcgaggatgatagatacgtggtcaagacaatccccagctgccggatgagcaccctggaaattccagccatggccttccacatgtttctgttcggcagcaagaaaaccgagaagctgatcgtggacgtgcacaaccggtacaagagactgttccaggccatgcagaaagaagaagtgaccgccgagaatatcgccagcttcggaatcgccgagagcgacctgcctcagaagatcctggatctgatcagcggcaatgcccacggcaaggatgtggacgccttcatcagactgaccgtggacgacatgctgaccgacaccgagcggagaatcaagagattcaaggacgaccggaagtccattcggagcgccgacaacaagatgggaaagagaggcttcaagcagatctccacaggcaagctggccgacttcctggccaaggacatcgtgctgtttcagcccagcgtgaacgatggcgagaacaagatcaccggcctgaactaccggatcatgcagagcgccattgccgtgtacgatagcggcgacgattacgaggccaagcagcagttcaagctgatgttcgagaaggcccggctgatcggcaagggcacaacagagcctcatccatttctgtacaaggtgttcgcccgcagcatccccgccaatgccgtcgagttctacgagcgctacctgatcgagcggaagttctacctgaccggcctgtccaacgagatcaagaaaggcaacagagtggatgtgcccttcatccggcgggaccagaacaagtggaaaacacccgccatgaagaccctgggcagaatctacagcgaggatctgcccgtggaactgcccagacagatgttcgacaatgagatcaagtcccacctgaagtccctgccacagatggaaggcatcgacttcaacaatgccaacgtgacctatctgatcgccgagtacatgaagagagtgctggacgacgacttccagaccttctaccagtggaaccgcaactaccggtacatggacatgcttaagggcgagtacgacagaaagggctccctgcagcactgcttcaccagcgtggaagagagagaaggcctctggaaagagcgggcctccagaacagagcggtacagaaagcaggccagcaacaagatccgcagcaaccggcagatgagaaacgccagcagcgaagagatcgagacaatcctggataagcggctgagcaacagccggaacgagtaccagaaaagcgagaaagtgatccggcgctacagagtgcaggatgccctgctgtttctgctggccaaaaagaccctgaccgaactggccgatttcgacggcgagaggttcaaactgaaagaaatcatgcccgacgccgagaagggaatcctgagcgagatcatgcccatgagcttcaccttcgagaaaggcggcaagaagtacaccatcaccagcgagggcatgaagctgaagaactacggcgacttctttgtgctggctagcgacaagaggatcggcaacctgctggaactcgtgggcagcgacatcgtgtccaaagaggattcgcgaggcggtggaggtagtggagggggaggatcaacgcgtgtgagcaagggcgaggaggataacatggccatcatcaaggagttcatgcgcttcaaggtgcacatggagggctccgtgaacggccacgagttcgagatcgagggcgagggcgagggccgcccctacgagggcacccagaccgccaagctgaaggtgaccaagggtggccccctgcccttcgcctgggacatcctgtcccctcagttcatgtacggctccaaggcctacgtgaagcaccccgccgacatccccgactacttgaagctgtccttccccgagggcttcaagtgggagcgcgtgatgaacttcgaggacggcggcgtggtgaccgtgacccaggactcctccctgcaggacggcgagttcatctacaaggtgaagctgcgcggcaccaacttcccctccgacggccccgtaatgcagaagaagaccatgggctgggaggcctcctccgagcggatgtaccccgaggacggcgccctgaagggcgagatcaagcagaggctgaagctgaaggacggcggccactacgacgctgaggtcaagaccacctacaaggccaagaagcccgtgcagctgcccggcgcctacaacgtcaacatcaagttggacatcacctcccacaacgaggactacaccatcgtggaacagtacgaacgcgccgagggccgccactccaccggcggcatggacgagctgtacaagtagtaa

SEQ ID NO: 247 - DNA, 3909 bp, Artificial Sequence
  chemically synthesized
atggactacaaagaccatgacggtgattataaagatcatgacatcgattacaaggatgacgatgacaagggcggaatgggttgttgtttcagcaagacagcggcgaaaggtgaagcagcagcagaaagaccaggcgaggctgcggtagcatcaagtccctccaaggctaatgggcaggaaaacggacacgtcaaagttggaagcggaggcaacatccccgctctggtggaaaaccagaagaagtactttggcacctacagcgtgatggccatgctgaacgctcagaccgtgctggaccacatccagaaggtggccgatattgagggcgagcagaacgagaacaacgagaatctgtggtttcaccccgtgatgagccacctgtacaacgccaagaacggctacgacaagcagcccgagaaaaccatgttcatcatcgagcggctgcagagctacttcccattcctgaagatcatggccgagaaccagagagagtacagcaacggcaagtacaagcagaaccgcgtggaagtgaacagcaacgacatcttcgaggtgctgaagcgcgccttcggcgtgctgaagatgtacagggacctgaccaacgcatacaagacctacgaggaaaagctgaacgacggctgcgagttcctgaccagcacagagcaacctctgagcggcatgatcaacaactactacacagtggccctgcggaacatgaacgagagatacggctacaagacagaggacctggccttcatccaggacaagcggttcaagttcgtgaaggacgcctacggcaagaaaaagtcccaagtgaataccggattcttcctgagcctgcaggactacaacggcgacacacagaagaagctgcacctgagcggagtgggaatcgccctgctgatctgcctgttcctggacaagcagtacatcaacatctttctgagcaggctgcccatcttctccagctacaatgcccagagcgaggaacggcggatcatcatcagatccttcggcatcaacagcatcaagctgcccaaggaccggatccacagcgagaagtccaacaagagcgtggccatggatatgctcaacgaagtgaagcggtgccccgacgagctgttcacaacactgtctgccgagaagcagtcccggttcagaatcatcagcgacgaccacaatgaagtgctgatgaagcggagcagcgacagattcgtgcctctgctgctgcagtatatcgattacggcaagctgttcgaccacatcaggttccacgtgaacatgggcaagctgagatacctgctgaaggccgacaagacctgcatcgacggccagaccagagtcagagtgatcgagcagcccctgaacggcttcggcagactggaagaggccgagacaatgcggaagcaagagaacggcaccttcggcaacagcggcatccggatcagagacttcgagaacatgaagcgggacgacgccaatcctgccaactatccctacatcgtggacacctacacacactacatcctggaaaacaacaaggtcgagatgtttatcaacgacaaagaggacagcgccccactgctgcccgtgatcgaggatgatagatacgtggtcaagacaatccccagctgccggatgagcaccctggaaattccagccatggccttccacatgtttctgttcggcagcaagaaaaccgagaagctgatcgtggacgtgcacaaccggtacaagagactgttccaggccatgcagaaagaagaagtgaccgccgagaatatcgccagcttcggaatcgccgagagcgacctgcctcagaagatcctggatctgatcagcggcaatgcccacggcaaggatgtggacgccttcatcagactgaccgtggacgacatgctgaccgacaccgagcggagaatcaagagattcaaggacgaccggaagtccattcggagcgccgacaacaagatgggaaagagaggcttcaagcagatctccacaggcaagctggccgacttcctggccaaggacatcgtgctgtttcagcccagcgtgaacgatggcgagaacaagatcaccggcctgaactaccggatcatgcagagcgccattgccgtgtacgatagcggcgacgattacgaggccaagcagcagttcaagctgatgttcgagaaggcccggctgatcggcaagggcacaacagagcctcatccatttctgtacaaggtgttcgcccgcagcatccccgccaatgccgtcgagttctacgagcgctacctgatcgagcggaagttctacctgaccggcctgtccaacgagatcaagaaaggcaacagagtggatgtgcccttcatccggcgggaccagaacaagtggaaaacacccgccatgaagaccctgggcagaatctacagcgaggatctgcccgtggaactgcccagacagatgttcgacaatgagatcaagtcccacctgaagtccctgccacagatggaaggcatcgacttcaacaatgccaacgtgacctatctgatcgccgagtacatgaagagagtgctggacgacgacttccagaccttctaccagtggaaccgcaactaccggtacatggacatgcttaagggcgagtacgacagaaagggctccctgcagcactgcttcaccagcgtggaagagagagaaggcctctggaaagagcgggcctccagaacagagcggtacagaaagcaggccagcaacaagatccgcagcaaccggcagatgagaaacgccagcagcgaagagatcgagacaatcctggataagcggctgagcaacagccggaacgagtaccagaaaagcgagaaagtgatccggcgctacagagtgcaggatgccctgctgtttctgctggccaaaaagaccctgaccgaactggccgatttcgacggcgagaggttcaaactgaaagaaatcatgcccgacgccgagaagggaatcctgagcgagatcatgcccatgagcttcaccttcgagaaaggcggcaagaagtacaccatcaccagcgagggcatgaagctgaagaactacggcgacttctttgtgctggctagcgacaagaggatcggcaacctgctggaactcgtgggcagcgacatcgtgtccaaagaggattcgcgaggcggtggaggtagtggagggggaggatcaacgcgtgtgagcaagggcgaggaggataacatggccatcatcaaggagttcatgcgcttcaaggtgcacatggagggctccgtgaacggccacgagttcgagatcgagggcgagggcgagggccgcccctacgagggcacccagaccgccaagctgaaggtgaccaagggtggccccctgcccttcgcctgggacatcctgtcccctcagttcatgtacggctccaaggcctacgtgaagcaccccgccgacatccccgactacttgaagctgtccttccccgagggcttcaagtgggagcgcgtgatgaacttcgaggacggcggcgtggtgaccgtgacccaggactcctccctgcaggacggcgagttcatctacaaggtgaagctgcgcggcaccaacttcccctccgacggccccgtaatgcagaagaagaccatgggctgggaggcctcctccgagcggatgtaccccgaggacggcgccctgaagggcgagatcaagcagaggctgaagctgaaggacggcggccactacgacgctgaggtcaagaccacctacaaggccaagaagcccgtgcagctgcccggcgcctacaacgtcaacatcaagttggacatcacctcccacaacgaggactacaccatcgtggaacagtacgaacgcgccgagggccgccactccaccggcggcatggacgagctgtacaagtagtaa

SEQ ID NO: 248 - DNA, 3831 bp, Artificial Sequence
  chemically synthesized
atggactacaaagaccatgacggtgattataaagatcatgacatcgattacaaggatgacgatgacaagggcggaatgctgctgcccgtccccctgctgctgggcctgctgggcgccgccgccgacggaggcaacatccccgctctggtggaaaaccagaagaagtactttggcacctacagcgtgatggccatgctgaacgctcagaccgtgctggaccacatccagaaggtggccgatattgagggcgagcagaacgagaacaacgagaatctgtggtttcaccccgtgatgagccacctgtacaacgccaagaacggctacgacaagcagcccgagaaaaccatgttcatcatcgagcggctgcagagctacttcccattcctgaagatcatggccgagaaccagagagagtacagcaacggcaagtacaagcagaaccgcgtggaagtgaacagcaacgacatcttcgaggtgctgaagcgcgccttcggcgtgctgaagatgtacagggacctgaccaacgcatacaagacctacgaggaaaagctgaacgacggctgcgagttcctgaccagcacagagcaacctctgagcggcatgatcaacaactactacacagtggccctgcggaacatgaacgagagatacggctacaagacagaggacctggccttcatccaggacaagcggttcaagttcgtgaaggacgcctacggcaagaaaaagtcccaagtgaataccggattcttcctgagcctgcaggactacaacggcgacacacagaagaagctgcacctgagcggagtgggaatcgccctgctgatctgcctgttcctggacaagcagtacatcaacatctttctgagcaggctgcccatcttctccagctacaatgcccagagcgaggaacggcggatcatcatcagatccttcggcatcaacagcatcaagctgcccaaggaccggatccacagcgagaagtccaacaagagcgtggccatggatatgctcaacgaagtgaagcggtgccccgacgagctgttcacaacactgtctgccgagaagcagtcccggttcagaatcatcagcgacgaccacaatgaagtgctgatgaagcggagcagcgacagattcgtgcctctgctgctgcagtatatcgattacggcaagctgttcgaccacatcaggttccacgtgaacatgggcaagctgagatacctgctgaaggccgacaagacctgcatcgacggccagaccagagtcagagtgatcgagcagcccctgaacggcttcggcagactggaagaggccgagacaatgcggaagcaagagaacggcaccttcggcaacagcggcatccggatcagagacttcgagaacatgaagcgggacgacgccaatcctgccaactatccctacatcgtggacacctacacacactacatcctggaaaacaacaaggtcgagatgtttatcaacgacaaagaggacagcgccccactgctgcccgtgatcgaggatgatagatacgtggtcaagacaatccccagctgccggatgagcaccctggaaattccagccatggccttccacatgtttctgttcggcagcaagaaaaccgagaagctgatcgtggacgtgcacaaccggtacaagagactgttccaggccatgcagaaagaagaagtgaccgccgagaatatcgccagcttcggaatcgccgagagcgacctgcctcagaagatcctggatctgatcagcggcaatgcccacggcaaggatgtggacgccttcatcagactgaccgtggacgacatgctgaccgacaccgagcggagaatcaagagattcaaggacgaccggaagtccattcggagcgccgacaacaagatgggaaagagaggcttcaagcagatctccacaggcaagctggccgacttcctggccaaggacatcgtgctgtttcagcccagcgtgaacgatggcgagaacaagatcaccggcctgaactaccggatcatgcagagcgccattgccgtgtacgatagcggcgacgattacgaggccaagcagcagttcaagctgatgttcgagaaggcccggctgatcggcaagggcacaacagagcctcatccatttctgtacaaggtgttcgcccgcagcatccccgccaatgccgtcgagttctacgagcgctacctgatcgagcggaagttctacctgaccggcctgtccaacgagatcaagaaaggcaacagagtggatgtgcccttcatccggcgggaccagaacaagtggaaaacacccgccatgaagaccctgggcagaatctacagcgaggatctgcccgtggaactgcccagacagatgttcgacaatgagatcaagtcccacctgaagtccctgccacagatggaaggcatcgacttcaacaatgccaacgtgacctatctgatcgccgagtacatgaagagagtgctggacgacgacttccagaccttctaccagtggaaccgcaactaccggtacatggacatgcttaagggcgagtacgacagaaagggctccctgcagcactgcttcaccagcgtggaagagagagaaggcctctggaaagagcgggcctccagaacagagcggtacagaaagcaggccagcaacaagatccgcagcaaccggcagatgagaaacgccagcagcgaagagatcgagacaatcctggataagcggctgagcaacagccggaacgagtaccagaaaagcgagaaagtgatccggcgctacagagtgcaggatgccctgctgtttctgctggccaaaaagaccctgaccgaactggccgatttcgacggcgagaggttcaaactgaaagaaatcatgcccgacgccgagaagggaatcctgagcgagatcatgcccatgagcttcaccttcgagaaaggcggcaagaagtacaccatcaccagcgagggcatgaagctgaagaactacggcgacttctttgtgctggctagcgacaagaggatcggcaacctgctggaactcgtgggcagcgacatcgtgtccaaagaggattcgcgaggcggtggaggtagtggagggggaggatcaacgcgtgtgagcaagggcgaggaggataacatggccatcatcaaggagttcatgcgcttcaaggtgcacatggagggctccgtgaacggccacgagttcgagatcgagggcgagggcgagggccgcccctacgagggcacccagaccgccaagctgaaggtgaccaagggtggccccctgcccttcgcctgggacatcctgtcccctcagttcatgtacggctccaaggcctacgtgaagcaccccgccgacatccccgactacttgaagctgtccttccccgagggcttcaagtgggagcgcgtgatgaacttcgaggacggcggcgtggtgaccgtgacccaggactcctccctgcaggacggcgagttcatctacaaggtgaagctgcgcggcaccaacttcccctccgacggccccgtaatgcagaagaagaccatgggctgggaggcctcctccgagcggatgtaccccgaggacggcgccctgaagggcgagatcaagcagaggctgaagctgaaggacggcggccactacgacgctgaggtcaagaccacctacaaggccaagaagcccgtgcagctgcccggcgcctacaacgtcaacatcaagttggacatcacctcccacaacgaggactacaccatcgtggaacagtacgaacgcgccgagggccgccactccaccggcggcatggacgagctgtacaagtagtaa

SEQ ID NO: 249 - DNA, 3810 bp, Artificial Sequence
  chemically synthesized
atggactacaaagaccatgacggtgattataaagatcatgacatcgattacaaggatgacgatgacaagggcggagggatcactctcggcaaggacgagctgtaaggaggcaacatccccgctctggtggaaaaccagaagaagtactttggcacctacagcgtgatggccatgctgaacgctcagaccgtgctggaccacatccagaaggtggccgatattgagggcgagcagaacgagaacaacgagaatctgtggtttcaccccgtgatgagccacctgtacaacgccaagaacggctacgacaagcagcccgagaaaaccatgttcatcatcgagcggctgcagagctacttcccattcctgaagatcatggccgagaaccagagagagtacagcaacggcaagtacaagcagaaccgcgtggaagtgaacagcaacgacatcttcgaggtgctgaagcgcgccttcggcgtgctgaagatgtacagggacctgaccaacgcatacaagacctacgaggaaaagctgaacgacggctgcgagttcctgaccagcacagagcaacctctgagcggcatgatcaacaactactacacagtggccctgcggaacatgaacgagagatacggctacaagacagaggacctggccttcatccaggacaagcggttcaagttcgtgaaggacgcctacggcaagaaaaagtcccaagtgaataccggattcttcctgagcctgcaggactacaacggcgacacacagaagaagctgcacctgagcggagtgggaatcgccctgctgatctgcctgttcctggacaagcagtacatcaacatctttctgagcaggctgcccatcttctccagctacaatgcccagagcgaggaacggcggatcatcatcagatccttcggcatcaacagcatcaagctgcccaaggaccggatccacagcgagaagtccaacaagagcgtggccatggatatgctcaacgaagtgaagcggtgccccgacgagctgttcacaacactgtctgccgagaagcagtcccggttcagaatcatcagcgacgaccacaatgaagtgctgatgaagcggagcagcgacagattcgtgcctctgctgctgcagtatatcgattacggcaagctgttcgaccacatcaggttccacgtgaacatgggcaagctgagatacctgctgaaggccgacaagacctgcatcgacggccagaccagagtcagagtgatcgagcagcccctgaacggcttcggcagactggaagaggccgagacaatgcggaagcaagagaacggcaccttcggcaacagcggcatccggatcagagacttcgagaacatgaagcgggacgacgccaatcctgccaactatccctacatcgtggacacctacacacactacatcctggaaaacaacaaggtcgagatgtttatcaacgacaaagaggacagcgccccactgctgcccgtgatcgaggatgatagatacgtggtcaagacaatccccagctgccggatgagcaccctggaaattccagccatggccttccacatgtttctgttcggcagcaagaaaaccgagaagctgatcgtggacgtgcacaaccggtacaagagactgttccaggccatgcagaaagaagaagtgaccgccgagaatatcgccagcttcggaatcgccgagagcgacctgcctcagaagatcctggatctgatcagcggcaatgcccacggcaaggatgtggacgccttcatcagactgaccgtggacgacatgctgaccgacaccgagcggagaatcaagagattcaaggacgaccggaagtccattcggagcgccgacaacaagatgggaaagagaggcttcaagcagatctccacaggcaagctggccgacttcctggccaaggacatcgtgctgtttcagcccagcgtgaacgatggcgagaacaagatcaccggcctgaactaccggatcatgcagagcgccattgccgtgtacgatagcggcgacgattacgaggccaagcagcagttcaagctgatgttcgagaaggcccggctgatcggcaagggcacaacagagcctcatccatttctgtacaaggtgttcgcccgcagcatccccgccaatgccgtcgagttctacgagcgctacctgatcgagcggaagttctacctgaccggcctgtccaacgagatcaagaaaggcaacagagtggatgtgcccttcatccggcgggaccagaacaagtggaaaacacccgccatgaagaccctgggcagaatctacagcgaggatctgcccgtggaactgcccagacagatgttcgacaatgagatcaagtcccacctgaagtccctgccacagatggaaggcatcgacttcaacaatgccaacgtgacctatctgatcgccgagtacatgaagagagtgctggacgacgacttccagaccttctaccagtggaaccgcaactaccggtacatggacatgcttaagggcgagtacgacagaaagggctccctgcagcactgcttcaccagcgtggaagagagagaaggcctctggaaagagcgggcctccagaacagagcggtacagaaagcaggccagcaacaagatccgcagcaaccggcagatgagaaacgccagcagcgaagagatcgagacaatcctggataagcggctgagcaacagccggaacgagtaccagaaaagcgagaaagtgatccggcgctacagagtgcaggatgccctgctgtttctgctggccaaaaagaccctgaccgaactggccgatttcgacggcgagaggttcaaactgaaagaaatcatgcccgacgccgagaagggaatcctgagcgagatcatgcccatgagcttcaccttcgagaaaggcggcaagaagtacaccatcaccagcgagggcatgaagctgaagaactacggcgacttctttgtgctggctagcgacaagaggatcggcaacctgctggaactcgtgggcagcgacatcgtgtccaaagaggattcgcgaggcggtggaggtagtggagggggaggatcaacgcgtgtgagcaagggcgaggaggataacatggccatcatcaaggagttcatgcgcttcaaggtgcacatggagggctccgtgaacggccacgagttcgagatcgagggcgagggcgagggccgcccctacgagggcacccagaccgccaagctgaaggtgaccaagggtggccccctgcccttcgcctgggacatcctgtcccctcagttcatgtacggctccaaggcctacgtgaagcaccccgccgacatccccgactacttgaagctgtccttccccgagggcttcaagtgggagcgcgtgatgaacttcgaggacggcggcgtggtgaccgtgacccaggactcctccctgcaggacggcgagttcatctacaaggtgaagctgcgcggcaccaacttcccctccgacggccccgtaatgcagaagaagaccatgggctgggaggcctcctccgagcggatgtaccccgaggacggcgccctgaagggcgagatcaagcagaggctgaagctgaaggacggcggccactacgacgctgaggtcaagaccacctacaaggccaagaagcccgtgcagctgcccggcgcctacaacgtcaacatcaagttggacatcacctcccacaacgaggactacaccatcgtggaacagtacgaacgcgccgagggccgccactccaccggcggcatggacgagctgtacaagtagtaa

SEQ ID NO: 250 - DNA, 3792 bp, Artificial Sequence
  chemically synthesized
atggactacaaagaccatgacggtgattataaagatcatgacatcgattacaaggatgacgatgacaagggcggatccaaattataaggaggcaacatccccgctctggtggaaaaccagaagaagtactttggcacctacagcgtgatggccatgctgaacgctcagaccgtgctggaccacatccagaaggtggccgatattgagggcgagcagaacgagaacaacgagaatctgtggtttcaccccgtgatgagccacctgtacaacgccaagaacggctacgacaagcagcccgagaaaaccatgttcatcatcgagcggctgcagagctacttcccattcctgaagatcatggccgagaaccagagagagtacagcaacggcaagtacaagcagaaccgcgtggaagtgaacagcaacgacatcttcgaggtgctgaagcgcgccttcggcgtgctgaagatgtacagggacctgaccaacgcatacaagacctacgaggaaaagctgaacgacggctgcgagttcctgaccagcacagagcaacctctgagcggcatgatcaacaactactacacagtggccctgcggaacatgaacgagagatacggctacaagacagaggacctggccttcatccaggacaagcggttcaagttcgtgaaggacgcctacggcaagaaaaagtcccaagtgaataccggattcttcctgagcctgcaggactacaacggcgacacacagaagaagctgcacctgagcggagtgggaatcgccctgctgatctgcctgttcctggacaagcagtacatcaacatctttctgagcaggctgcccatcttctccagctacaatgcccagagcgaggaacggcggatcatcatcagatccttcggcatcaacagcatcaagctgcccaaggaccggatccacagcgagaagtccaacaagagcgtggccatggatatgctcaacgaagtgaagcggtgccccgacgagctgttcacaacactgtctgccgagaagcagtcccggttcagaatcatcagcgacgaccacaatgaagtgctgatgaagcggagcagcgacagattcgtgcctctgctgctgcagtatatcgattacggcaagctgttcgaccacatcaggttccacgtgaacatgggcaagctgagatacctgctgaaggccgacaagacctgcatcgacggccagaccagagtcagagtgatcgagcagcccctgaacggcttcggcagactggaagaggccgagacaatgcggaagcaagagaacggcaccttcggcaacagcggcatccggatcagagacttcgagaacatgaagcgggacgacgccaatcctgccaactatccctacatcgtggacacctacacacactacatcctggaaaacaacaaggtcgagatgtttatcaacgacaaagaggacagcgccccactgctgcccgtgatcgaggatgatagatacgtggtcaagacaatccccagctgccggatgagcaccctggaaattccagccatggccttccacatgtttctgttcggcagcaagaaaaccgagaagctgatcgtggacgtgcacaaccggtacaagagactgttccaggccatgcagaaagaagaagtgaccgccgagaatatcgccagcttcggaatcgccgagagcgacctgcctcagaagatcctggatctgatcagcggcaatgcccacggcaaggatgtggacgccttcatcagactgaccgtggacgacatgctgaccgacaccgagcggagaatcaagagattcaaggacgaccggaagtccattcggagcgccgacaacaagatgggaaagagaggcttcaagcagatctccacaggcaagctggccgacttcctggccaaggacatcgtgctgtttcagcccagcgtgaacgatggcgagaacaagatcaccggcctgaactaccggatcatgcagagcgccattgccgtgtacgatagcggcgacgattacgaggccaagcagcagttcaagctgatgttcgagaaggcccggctgatcggcaagggcacaacagagcctcatccatttctgtacaaggtgttcgcccgcagcatccccgccaatgccgtcgagttctacgagcgctacctgatcgagcggaagttctacctgaccggcctgtccaacgagatcaagaaaggcaacagagtggatgtgcccttcatccggcgggaccagaacaagtggaaaacacccgccatgaagaccctgggcagaatctacagcgaggatctgcccgtggaactgcccagacagatgttcgacaatgagatcaagtcccacctgaagtccctgccacagatggaaggcatcgacttcaacaatgccaacgtgacctatctgatcgccgagtacatgaagagagtgctggacgacgacttccagaccttctaccagtggaaccgcaactaccggtacatggacatgcttaagggcgagtacgacagaaagggctccctgcagcactgcttcaccagcgtggaagagagagaaggcctctggaaagagcgggcctccagaacagagcggtacagaaagcaggccagcaacaagatccgcagcaaccggcagatgagaaacgccagcagcgaagagatcgagacaatcctggataagcggctgagcaacagccggaacgagtaccagaaaagcgagaaagtgatccggcgctacagagtgcaggatgccctgctgtttctgctggccaaaaagaccctgaccgaactggccgatttcgacggcgagaggttcaaactgaaagaaatcatgcccgacgccgagaagggaatcctgagcgagatcatgcccatgagcttcaccttcgagaaaggcggcaagaagtacaccatcaccagcgagggcatgaagctgaagaactacggcgacttctttgtgctggctagcgacaagaggatcggcaacctgctggaactcgtgggcagcgacatcgtgtccaaagaggattcgcgaggcggtggaggtagtggagggggaggatcaacgcgtgtgagcaagggcgaggaggataacatggccatcatcaaggagttcatgcgcttcaaggtgcacatggagggctccgtgaacggccacgagttcgagatcgagggcgagggcgagggccgcccctacgagggcacccagaccgccaagctgaaggtgaccaagggtggccccctgcccttcgcctgggacatcctgtcccctcagttcatgtacggctccaaggcctacgtgaagcaccccgccgacatccccgactacttgaagctgtccttccccgagggcttcaagtgggagcgcgtgatgaacttcgaggacggcggcgtggtgaccgtgacccaggactcctccctgcaggacggcgagttcatctacaaggtgaagctgcgcggcaccaacttcccctccgacggccccgtaatgcagaagaagaccatgggctgggaggcctcctccgagcggatgtaccccgaggacggcgccctgaagggcgagatcaagcagaggctgaagctgaaggacggcggccactacgacgctgaggtcaagaccacctacaaggccaagaagcccgtgcagctgcccggcgcctacaacgtcaacatcaagttggacatcacctcccacaacgaggactacaccatcgtggaacagtacgaacgcgccgagggccgccactccaccggcggcatggacgagctgtacaagtagtaa

SEQ ID NO: 251 - DNA, 3945 bp, Artificial Sequence
  chemically synthesized
atggactacaaagaccatgacggtgattataaagatcatgacatcgattacaaggatgacgatgacaagggcggaaactcaaagaaaaggtcactggaggacaacgaaacggaaatcaaagtctccagagacacctggaacactaagaacatgcggtccctggaaccgccacgaagcaagaaacggatacatggaggcaacatccccgctctggtggaaaaccagaagaagtactttggcacctacagcgtgatggccatgctgaacgctcagaccgtgctggaccacatccagaaggtggccgatattgagggcgagcagaacgagaacaacgagaatctgtggtttcaccccgtgatgagccacctgtacaacgccaagaacggctacgacaagcagcccgagaaaaccatgttcatcatcgagcggctgcagagctacttcccattcctgaagatcatggccgagaaccagagagagtacagcaacggcaagtacaagcagaaccgcgtggaagtgaacagcaacgacatcttcgaggtgctgaagcgcgccttcggcgtgctgaagatgtacagggacctgaccaacgcatacaagacctacgaggaaaagctgaacgacggctgcgagttcctgaccagcacagagcaacctctgagcggcatgatcaacaactactacacagtggccctgcggaacatgaacgagagatacggctacaagacagaggacctggccttcatccaggacaagcggttcaagttcgtgaaggacgcctacggcaagaaaaagtcccaagtgaataccggattcttcctgagcctgcaggactacaacggcgacacacagaagaagctgcacctgagcggagtgggaatcgccctgctgatctgcctgttcctggacaagcagtacatcaacatctttctgagcaggctgcccatcttctccagctacaatgcccagagcgaggaacggcggatcatcatcagatccttcggcatcaacagcatcaagctgcccaaggaccggatccacagcgagaagtccaacaagagcgtggccatggatatgctcaacgaagtgaagcggtgccccgacgagctgttcacaacactgtctgccgagaagcagtcccggttcagaatcatcagcgacgaccacaatgaagtgctgatgaagcggagcagcgacagattcgtgcctctgctgctgcagtatatcgattacggcaagctgttcgaccacatcaggttccacgtgaacatgggcaagctgagatacctgctgaaggccgacaagacctgcatcgacggccagaccagagtcagagtgatcgagcagcccctgaacggcttcggcagactggaagaggccgagacaatgcggaagcaagagaacggcaccttcggcaacagcggcatccggatcagagacttcgagaacatgaagcgggacgacgccaatcctgccaactatccctacatcgtggacacctacacacactacatcctggaaaacaacaaggtcgagatgtttatcaacgacaaagaggacagcgccccactgctgcccgtgatcgaggatgatagatacgtggtcaagacaatccccagctgccggatgagcaccctggaaattccagccatggccttccacatgtttctgttcggcagcaagaaaaccgagaagctgatcgtggacgtgcacaaccggtacaagagactgttccaggccatgcagaaagaagaagtgaccgccgagaatatcgccagcttcggaatcgccgagagcgacctgcctcagaagatcctggatctgatcagcggcaatgcccacggcaaggatgtggacgccttcatcagactgaccgtggacgacatgctgaccgacaccgagcggagaatcaagagattcaaggacgaccggaagtccattcggagcgccgacaacaagatgggaaagagaggcttcaagcagatctccacaggcaagctggccgacttcctggccaaggacatcgtgctgtttcagcccagcgtgaacgatggcgagaacaagatcaccggcctgaactaccggatcatgcagagcgccattgccgtgtacgatagcggcgacgattacgaggccaagcagcagttcaagctgatgttcgagaaggcccggctgatcggcaagggcacaacagagcctcatccatttctgtacaaggtgttcgcccgcagcatccccgccaatgccgtcgagttctacgagcgctacctgatcgagcggaagttctacctgaccggcctgtccaacgagatcaagaaaggcaacagagtggatgtgcccttcatccggcgggaccagaacaagtggaaaacacccgccatgaagaccctgggcagaatctacagcgaggatctgcccgtggaactgcccagacagatgttcgacaatgagatcaagtcccacctgaagtccctgccacagatggaaggcatcgacttcaacaatgccaacgtgacctatctgatcgccgagtacatgaagagagtgctggacgacgacttccagaccttctaccagtggaaccgcaactaccggtacatggacatgcttaagggcgagtacgacagaaagggctccctgcagcactgcttcaccagcgtggaagagagagaaggcctctggaaagagcgggcctccagaacagagcggtacagaaagcaggccagcaacaagatccgcagcaaccggcagatgagaaacgccagcagcgaagagatcgagacaatcctggataagcggctgagcaacagccggaacgagtaccagaaaagcgagaaagtgatccggcgctacagagtgcaggatgccctgctgtttctgctggccaaaaagaccctgaccgaactggccgatttcgacggcgagaggttcaaactgaaagaaatcatgcccgacgccgagaagggaatcctgagcgagatcatgcccatgagcttcaccttcgagaaaggcggcaagaagtacaccatcaccagcgagggcatgaagctgaagaactacggcgacttctttgtgctggctagcgacaagaggatcggcaacctgctggaactcgtgggcagcgacatcgtgtccaaagaggatatcatggaagagttcaacaaatacgaccagtgcaggcccgagatcagctccatcgtgttcaacctggaaaagtgggccttcgacacataccccgagctgtctgccagagtggaccgggaagagaaggtggacttcaagagcatcctgaaaatcctgctgaacaacaagaacatcaacaaagagcagagcgacatcctgcggaagatccggaacgccttcgatgcaaacaattaccccgacaaaggcgtggtggaaatcaaggccctgcctgagatcgccatgagcatcaagaaggcctttggggagtacgccatcatgaagtcgcgaggcggtggaggtagtggagggggaggatcaacgcgtggaggtagagatcacatggtactgcacgaatatgtaaatgctgcaggcatcactggtggctcaggagggcgcgaccacatggttttgcacgagtatgtgaacgccgccggaataacggggggttcaggaggccgggatcatatggttctccatgaatatgtcaacgcggctggtattacgggcggatcaggcgggcgggatcacatggttcttcacgaatacgtcaacgcggctggaattacaggtggttccggaggaagagatcacatggtactccacgaatatgttaatgctgcaggtataactggcggctctgggggtcgggatcatatggtgttgcatgaatacgtcaacgcagccgggataaccggaggttctggtggtcgagatcacatggtactccatgaatatgtaaatgcggctggaataacatagtaa

SEQ ID NO: 252 - DNA, 3861 bp, Artificial Sequence
  chemically synthesized
atggactacaaagaccatgacggtgattataaagatcatgacatcgattacaaggatgacgatgacaagggcggacttcaactgcctccacttgaaagactgacactgggaggcaacatccccgctctggtggaaaaccagaagaagtactttggcacctacagcgtgatggccatgctgaacgctcagaccgtgctggaccacatccagaaggtggccgatattgagggcgagcagaacgagaacaacgagaatctgtggtttcaccccgtgatgagccacctgtacaacgccaagaacggctacgacaagcagcccgagaaaaccatgttcatcatcgagcggctgcagagctacttcccattcctgaagatcatggccgagaaccagagagagtacagcaacggcaagtacaagcagaaccgcgtggaagtgaacagcaacgacatcttcgaggtgctgaagcgcgccttcggcgtgctgaagatgtacagggacctgaccaacgcatacaagacctacgaggaaaagctgaacgacggctgcgagttcctgaccagcacagagcaacctctgagcggcatgatcaacaactactacacagtggccctgcggaacatgaacgagagatacggctacaagacagaggacctggccttcatccaggacaagcggttcaagttcgtgaaggacgcctacggcaagaaaaagtcccaagtgaataccggattcttcctgagcctgcaggactacaacggcgacacacagaagaagctgcacctgagcggagtgggaatcgccctgctgatctgcctgttcctggacaagcagtacatcaacatctttctgagcaggctgcccatcttctccagctacaatgcccagagcgaggaacggcggatcatcatcagatccttcggcatcaacagcatcaagctgcccaaggaccggatccacagcgagaagtccaacaagagcgtggccatggatatgctcaacgaagtgaagcggtgccccgacgagctgttcacaacactgtctgccgagaagcagtcccggttcagaatcatcagcgacgaccacaatgaagtgctgatgaagcggagcagcgacagattcgtgcctctgctgctgcagtatatcgattacggcaagctgttcgaccacatcaggttccacgtgaacatgggcaagctgagatacctgctgaaggccgacaagacctgcatcgacggccagaccagagtcagagtgatcgagcagcccctgaacggcttcggcagactggaagaggccgagacaatgcggaagcaagagaacggcaccttcggcaacagcggcatccggatcagagacttcgagaacatgaagcgggacgacgccaatcctgccaactatccctacatcgtggacacctacacacactacatcctggaaaacaacaaggtcgagatgtttatcaacgacaaagaggacagcgccccactgctgcccgtgatcgaggatgatagatacgtggtcaagacaatccccagctgccggatgagcaccctggaaattccagccatggccttccacatgtttctgttcggcagcaagaaaaccgagaagctgatcgtggacgtgcacaaccggtacaagagactgttccaggccatgcagaaagaagaagtgaccgccgagaatatcgccagcttcggaatcgccgagagcgacctgcctcagaagatcctggatctgatcagcggcaatgcccacggcaaggatgtggacgccttcatcagactgaccgtggacgacatgctgaccgacaccgagcggagaatcaagagattcaaggacgaccggaagtccattcggagcgccgacaacaagatgggaaagagaggcttcaagcagatctccacaggcaagctggccgacttcctggccaaggacatcgtgctgtttcagcccagcgtgaacgatggcgagaacaagatcaccggcctgaactaccggatcatgcagagcgccattgccgtgtacgatagcggcgacgattacgaggccaagcagcagttcaagctgatgttcgagaaggcccggctgatcggcaagggcacaacagagcctcatccatttctgtacaaggtgttcgcccgcagcatccccgccaatgccgtcgagttctacgagcgctacctgatcgagcggaagttctacctgaccggcctgtccaacgagatcaagaaaggcaacagagtggatgtgcccttcatccggcgggaccagaacaagtggaaaacacccgccatgaagaccctgggcagaatctacagcgaggatctgcccgtggaactgcccagacagatgttcgacaatgagatcaagtcccacctgaagtccctgccacagatggaaggcatcgacttcaacaatgccaacgtgacctatctgatcgccgagtacatgaagagagtgctggacgacgacttccagaccttctaccagtggaaccgcaactaccggtacatggacatgcttaagggcgagtacgacagaaagggctccctgcagcactgcttcaccagcgtggaagagagagaaggcctctggaaagagcgggcctccagaacagagcggtacagaaagcaggccagcaacaagatccgcagcaaccggcagatgagaaacgccagcagcgaagagatcgagacaatcctggataagcggctgagcaacagccggaacgagtaccagaaaagcgagaaagtgatccggcgctacagagtgcaggatgccctgctgtttctgctggccaaaaagaccctgaccgaactggccgatttcgacggcgagaggttcaaactgaaagaaatcatgcccgacgccgagaagggaatcctgagcgagatcatgcccatgagcttcaccttcgagaaaggcggcaagaagtacaccatcaccagcgagggcatgaagctgaagaactacggcgacttctttgtgctggctagcgacaagaggatcggcaacctgctggaactcgtgggcagcgacatcgtgtccaaagaggatatcatggaagagttcaacaaatacgaccagtgcaggcccgagatcagctccatcgtgttcaacctggaaaagtgggccttcgacacataccccgagctgtctgccagagtggaccgggaagagaaggtggacttcaagagcatcctgaaaatcctgctgaacaacaagaacatcaacaaagagcagagcgacatcctgcggaagatccggaacgccttcgatgcaaacaattaccccgacaaaggcgtggtggaaatcaaggccctgcctgagatcgccatgagcatcaagaaggcctttggggagtacgccatcatgaagtcgcgaggcggtggaggtagtggagggggaggatcaacgcgtggaggtagagatcacatggtactgcacgaatatgtaaatgctgcaggcatcactggtggctcaggagggcgcgaccacatggttttgcacgagtatgtgaacgccgccggaataacggggggttcaggaggccgggatcatatggttctccatgaatatgtcaacgcggctggtattacgggcggatcaggcgggcgggatcacatggttcttcacgaatacgtcaacgcggctggaattacaggtggttccggaggaagagatcacatggtactccacgaatatgttaatgctgcaggtataactggcggctctgggggtcgggatcatatggtgttgcatgaatacgtcaacgcagccgggataaccggaggttctggtggtcgagatcacatggtactccatgaatatgtaaatgcggctggaataacatagtaa

SEQ ID NO: 253 - DNA, 3876 bp, Artificial Sequence
  chemically synthesized
atggactacaaagaccatgacggtgattataaagatcatgacatcgattacaaggatgacgatgacaagggcggaggatcccttcaactgcctccacttgaaagactgacactgggtagttccggaggcaacatccccgctctggtggaaaaccagaagaagtactttggcacctacagcgtgatggccatgctgaacgctcagaccgtgctggaccacatccagaaggtggccgatattgagggcgagcagaacgagaacaacgagaatctgtggtttcaccccgtgatgagccacctgtacaacgccaagaacggctacgacaagcagcccgagaaaaccatgttcatcatcgagcggctgcagagctacttcccattcctgaagatcatggccgagaaccagagagagtacagcaacggcaagtacaagcagaaccgcgtggaagtgaacagcaacgacatcttcgaggtgctgaagcgcgccttcggcgtgctgaagatgtacagggacctgaccaacgcatacaagacctacgaggaaaagctgaacgacggctgcgagttcctgaccagcacagagcaacctctgagcggcatgatcaacaactactacacagtggccctgcggaacatgaacgagagatacggctacaagacagaggacctggccttcatccaggacaagcggttcaagttcgtgaaggacgcctacggcaagaaaaagtcccaagtgaataccggattcttcctgagcctgcaggactacaacggcgacacacagaagaagctgcacctgagcggagtgggaatcgccctgctgatctgcctgttcctggacaagcagtacatcaacatctttctgagcaggctgcccatcttctccagctacaatgcccagagcgaggaacggcggatcatcatcagatccttcggcatcaacagcatcaagctgcccaaggaccggatccacagcgagaagtccaacaagagcgtggccatggatatgctcaacgaagtgaagcggtgccccgacgagctgttcacaacactgtctgccgagaagcagtcccggttcagaatcatcagcgacgaccacaatgaagtgctgatgaagcggagcagcgacagattcgtgcctctgctgctgcagtatatcgattacggcaagctgttcgaccacatcaggttccacgtgaacatgggcaagctgagatacctgctgaaggccgacaagacctgcatcgacggccagaccagagtcagagtgatcgagcagcccctgaacggcttcggcagactggaagaggccgagacaatgcggaagcaagagaacggcaccttcggcaacagcggcatccggatcagagacttcgagaacatgaagcgggacgacgccaatcctgccaactatccctacatcgtggacacctacacacactacatcctggaaaacaacaaggtcgagatgtttatcaacgacaaagaggacagcgccccactgctgcccgtgatcgaggatgatagatacgtggtcaagacaatccccagctgccggatgagcaccctggaaattccagccatggccttccacatgtttctgttcggcagcaagaaaaccgagaagctgatcgtggacgtgcacaaccggtacaagagactgttccaggccatgcagaaagaagaagtgaccgccgagaatatcgccagcttcggaatcgccgagagcgacctgcctcagaagatcctggatctgatcagcggcaatgcccacggcaaggatgtggacgccttcatcagactgaccgtggacgacatgctgaccgacaccgagcggagaatcaagagattcaaggacgaccggaagtccattcggagcgccgacaacaagatgggaaagagaggcttcaagcagatctccacaggcaagctggccgacttcctggccaaggacatcgtgctgtttcagcccagcgtgaacgatggcgagaacaagatcaccggcctgaactaccggatcatgcagagcgccattgccgtgtacgatagcggcgacgattacgaggccaagcagcagttcaagctgatgttcgagaaggcccggctgatcggcaagggcacaacagagcctcatccatttctgtacaaggtgttcgcccgcagcatccccgccaatgccgtcgagttctacgagcgctacctgatcgagcggaagttctacctgaccggcctgtccaacgagatcaagaaaggcaacagagtggatgtgcccttcatccggcgggaccagaacaagtggaaaacacccgccatgaagaccctgggcagaatctacagcgaggatctgcccgtggaactgcccagacagatgttcgacaatgagatcaagtcccacctgaagtccctgccacagatggaaggcatcgacttcaacaatgccaacgtgacctatctgatcgccgagtacatgaagagagtgctggacgacgacttccagaccttctaccagtggaaccgcaactaccggtacatggacatgcttaagggcgagtacgacagaaagggctccctgcagcactgcttcaccagcgtggaagagagagaaggcctctggaaagagcgggcctccagaacagagcggtacagaaagcaggccagcaacaagatccgcagcaaccggcagatgagaaacgccagcagcgaagagatcgagacaatcctggataagcggctgagcaacagccggaacgagtaccagaaaagcgagaaagtgatccggcgctacagagtgcaggatgccctgctgtttctgctggccaaaaagaccctgaccgaactggccgatttcgacggcgagaggttcaaactgaaagaaatcatgcccgacgccgagaagggaatcctgagcgagatcatgcccatgagcttcaccttcgagaaaggcggcaagaagtacaccatcaccagcgagggcatgaagctgaagaactacggcgacttctttgtgctggctagcgacaagaggatcggcaacctgctggaactcgtgggcagcgacatcgtgtccaaagaggatatcatggaagagttcaacaaatacgaccagtgcaggcccgagatcagctccatcgtgttcaacctggaaaagtgggccttcgacacataccccgagctgtctgccagagtggaccgggaagagaaggtggacttcaagagcatcctgaaaatcctgctgaacaacaagaacatcaacaaagagcagagcgacatcctgcggaagatccggaacgccttcgatgcaaacaattaccccgacaaaggcgtggtggaaatcaaggccctgcctgagatcgccatgagcatcaagaaggcctttggggagtacgccatcatgaagtcgcgaggcggtggaggtagtggagggggaggatcaacgcgtggaggtagagatcacatggtactgcacgaatatgtaaatgctgcaggcatcactggtggctcaggagggcgcgaccacatggttttgcacgagtatgtgaacgccgccggaataacggggggttcaggaggccgggatcatatggttctccatgaatatgtcaacgcggctggtattacgggcggatcaggcgggcgggatcacatggttcttcacgaatacgtcaacgcggctggaattacaggtggttccggaggaagagatcacatggtactccacgaatatgttaatgctgcaggtataactggcggctctgggggtcgggatcatatggtgttgcatgaatacgtcaacgcagccgggataaccggaggttctggtggtcgagatcacatggtactccatgaatatgtaaatgcggctggaataacatagtaa

SEQ ID NO: 254 - DNA, 3924 bp, Artificial Sequence
  chemically synthesized
atggactacaaagaccatgacggtgattataaagatcatgacatcgattacaaggatgacgatgacaagggcggaatgagtgtgttgacgccgttgcttctgcgagggcttaccgggtctgctagaagacttccggtccccagggccaagatacatagcctcggagacccgggaggcaacatccccgctctggtggaaaaccagaagaagtactttggcacctacagcgtgatggccatgctgaacgctcagaccgtgctggaccacatccagaaggtggccgatattgagggcgagcagaacgagaacaacgagaatctgtggtttcaccccgtgatgagccacctgtacaacgccaagaacggctacgacaagcagcccgagaaaaccatgttcatcatcgagcggctgcagagctacttcccattcctgaagatcatggccgagaaccagagagagtacagcaacggcaagtacaagcagaaccgcgtggaagtgaacagcaacgacatcttcgaggtgctgaagcgcgccttcggcgtgctgaagatgtacagggacctgaccaacgcatacaagacctacgaggaaaagctgaacgacggctgcgagttcctgaccagcacagagcaacctctgagcggcatgatcaacaactactacacagtggccctgcggaacatgaacgagagatacggctacaagacagaggacctggccttcatccaggacaagcggttcaagttcgtgaaggacgcctacggcaagaaaaagtcccaagtgaataccggattcttcctgagcctgcaggactacaacggcgacacacagaagaagctgcacctgagcggagtgggaatcgccctgctgatctgcctgttcctggacaagcagtacatcaacatctttctgagcaggctgcccatcttctccagctacaatgcccagagcgaggaacggcggatcatcatcagatccttcggcatcaacagcatcaagctgcccaaggaccggatccacagcgagaagtccaacaagagcgtggccatggatatgctcaacgaagtgaagcggtgccccgacgagctgttcacaacactgtctgccgagaagcagtcccggttcagaatcatcagcgacgaccacaatgaagtgctgatgaagcggagcagcgacagattcgtgcctctgctgctgcagtatatcgattacggcaagctgttcgaccacatcaggttccacgtgaacatgggcaagctgagatacctgctgaaggccgacaagacctgcatcgacggccagaccagagtcagagtgatcgagcagcccctgaacggcttcggcagactggaagaggccgagacaatgcggaagcaagagaacggcaccttcggcaacagcggcatccggatcagagacttcgagaacatgaagcgggacgacgccaatcctgccaactatccctacatcgtggacacctacacacactacatcctggaaaacaacaaggtcgagatgtttatcaacgacaaagaggacagcgccccactgctgcccgtgatcgaggatgatagatacgtggtcaagacaatccccagctgccggatgagcaccctggaaattccagccatggccttccacatgtttctgttcggcagcaagaaaaccgagaagctgatcgtggacgtgcacaaccggtacaagagactgttccaggccatgcagaaagaagaagtgaccgccgagaatatcgccagcttcggaatcgccgagagcgacctgcctcagaagatcctggatctgatcagcggcaatgcccacggcaaggatgtggacgccttcatcagactgaccgtggacgacatgctgaccgacaccgagcggagaatcaagagattcaaggacgaccggaagtccattcggagcgccgacaacaagatgggaaagagaggcttcaagcagatctccacaggcaagctggccgacttcctggccaaggacatcgtgctgtttcagcccagcgtgaacgatggcgagaacaagatcaccggcctgaactaccggatcatgcagagcgccattgccgtgtacgatagcggcgacgattacgaggccaagcagcagttcaagctgatgttcgagaaggcccggctgatcggcaagggcacaacagagcctcatccatttctgtacaaggtgttcgcccgcagcatccccgccaatgccgtcgagttctacgagcgctacctgatcgagcggaagttctacctgaccggcctgtccaacgagatcaagaaaggcaacagagtggatgtgcccttcatccggcgggaccagaacaagtggaaaacacccgccatgaagaccctgggcagaatctacagcgaggatctgcccgtggaactgcccagacagatgttcgacaatgagatcaagtcccacctgaagtccctgccacagatggaaggcatcgacttcaacaatgccaacgtgacctatctgatcgccgagtacatgaagagagtgctggacgacgacttccagaccttctaccagtggaaccgcaactaccggtacatggacatgcttaagggcgagtacgacagaaagggctccctgcagcactgcttcaccagcgtggaagagagagaaggcctctggaaagagcgggcctccagaacagagcggtacagaaagcaggccagcaacaagatccgcagcaaccggcagatgagaaacgccagcagcgaagagatcgagacaatcctggataagcggctgagcaacagccggaacgagtaccagaaaagcgagaaagtgatccggcgctacagagtgcaggatgccctgctgtttctgctggccaaaaagaccctgaccgaactggccgatttcgacggcgagaggttcaaactgaaagaaatcatgcccgacgccgagaagggaatcctgagcgagatcatgcccatgagcttcaccttcgagaaaggcggcaagaagtacaccatcaccagcgagggcatgaagctgaagaactacggcgacttctttgtgctggctagcgacaagaggatcggcaacctgctggaactcgtgggcagcgacatcgtgtccaaagaggatatcatggaagagttcaacaaatacgaccagtgcaggcccgagatcagctccatcgtgttcaacctggaaaagtgggccttcgacacataccccgagctgtctgccagagtggaccgggaagagaaggtggacttcaagagcatcctgaaaatcctgctgaacaacaagaacatcaacaaagagcagagcgacatcctgcggaagatccggaacgccttcgatgcaaacaattaccccgacaaaggcgtggtggaaatcaaggccctgcctgagatcgccatgagcatcaagaaggcctttggggagtacgccatcatgaagtcgcgaggcggtggaggtagtggagggggaggatcaacgcgtggaggtagagatcacatggtactgcacgaatatgtaaatgctgcaggcatcactggtggctcaggagggcgcgaccacatggttttgcacgagtatgtgaacgccgccggaataacggggggttcaggaggccgggatcatatggttctccatgaatatgtcaacgcggctggtattacgggcggatcaggcgggcgggatcacatggttcttcacgaatacgtcaacgcggctggaattacaggtggttccggaggaagagatcacatggtactccacgaatatgttaatgctgcaggtataactggcggctctgggggtcgggatcatatggtgttgcatgaatacgtcaacgcagccgggataaccggaggttctggtggtcgagatcacatggtactccatgaatatgtaaatgcggctggaataacatagtaa

SEQ ID NO: 255 - DNA, 4218 bp, Artificial Sequence
  chemically synthesized
atggactacaaagaccatgacggtgattataaagatcatgacatcgattacaaggatgacgatgacaagggcggaatgagtgtgttgacgccgttgcttctgcgagggcttaccgggtctgctagaagacttccggtccccagggccaagatacatagcctcggagacccgatgtctgtgctcactcctctgcttttgcgaggactgactgggtccgccagacgactcccggtgccgagagctaaaatccatagcctgggaaaattggcaactatgtcagtcctgacgccgcttcttctccggggtcttacagggtctgcaagaaggctgcctgtacctcgggcgaaaattcatagcttgggcgacccgatgagtgtattgacgcccctgttgctgagaggattgactgggtcagcgcgccggctccctgtcccccgagctaagattcactcccttggtaagctgggaggcaacatccccgctctggtggaaaaccagaagaagtactttggcacctacagcgtgatggccatgctgaacgctcagaccgtgctggaccacatccagaaggtggccgatattgagggcgagcagaacgagaacaacgagaatctgtggtttcaccccgtgatgagccacctgtacaacgccaagaacggctacgacaagcagcccgagaaaaccatgttcatcatcgagcggctgcagagctacttcccattcctgaagatcatggccgagaaccagagagagtacagcaacggcaagtacaagcagaaccgcgtggaagtgaacagcaacgacatcttcgaggtgctgaagcgcgccttcggcgtgctgaagatgtacagggacctgaccaacgcatacaagacctacgaggaaaagctgaacgacggctgcgagttcctgaccagcacagagcaacctctgagcggcatgatcaacaactactacacagtggccctgcggaacatgaacgagagatacggctacaagacagaggacctggccttcatccaggacaagcggttcaagttcgtgaaggacgcctacggcaagaaaaagtcccaagtgaataccggattcttcctgagcctgcaggactacaacggcgacacacagaagaagctgcacctgagcggagtgggaatcgccctgctgatctgcctgttcctggacaagcagtacatcaacatctttctgagcaggctgcccatcttctccagctacaatgcccagagcgaggaacggcggatcatcatcagatccttcggcatcaacagcatcaagctgcccaaggaccggatccacagcgagaagtccaacaagagcgtggccatggatatgctcaacgaagtgaagcggtgccccgacgagctgttcacaacactgtctgccgagaagcagtcccggttcagaatcatcagcgacgaccacaatgaagtgctgatgaagcggagcagcgacagattcgtgcctctgctgctgcagtatatcgattacggcaagctgttcgaccacatcaggttccacgtgaacatgggcaagctgagatacctgctgaaggccgacaagacctgcatcgacggccagaccagagtcagagtgatcgagcagcccctgaacggcttcggcagactggaagaggccgagacaatgcggaagcaagagaacggcaccttcggcaacagcggcatccggatcagagacttcgagaacatgaagcgggacgacgccaatcctgccaactatccctacatcgtggacacctacacacactacatcctggaaaacaacaaggtcgagatgtttatcaacgacaaagaggacagcgccccactgctgcccgtgatcgaggatgatagatacgtggtcaagacaatccccagctgccggatgagcaccctggaaattccagccatggccttccacatgtttctgttcggcagcaagaaaaccgagaagctgatcgtggacgtgcacaaccggtacaagagactgttccaggccatgcagaaagaagaagtgaccgccgagaatatcgccagcttcggaatcgccgagagcgacctgcctcagaagatcctggatctgatcagcggcaatgcccacggcaaggatgtggacgccttcatcagactgaccgtggacgacatgctgaccgacaccgagcggagaatcaagagattcaaggacgaccggaagtccattcggagcgccgacaacaagatgggaaagagaggcttcaagcagatctccacaggcaagctggccgacttcctggccaaggacatcgtgctgtttcagcccagcgtgaacgatggcgagaacaagatcaccggcctgaactaccggatcatgcagagcgccattgccgtgtacgatagcggcgacgattacgaggccaagcagcagttcaagctgatgttcgagaaggcccggctgatcggcaagggcacaacagagcctcatccatttctgtacaaggtgttcgcccgcagcatccccgccaatgccgtcgagttctacgagcgctacctgatcgagcggaagttctacctgaccggcctgtccaacgagatcaagaaaggcaacagagtggatgtgcccttcatccggcgggaccagaacaagtggaaaacacccgccatgaagaccctgggcagaatctacagcgaggatctgcccgtggaactgcccagacagatgttcgacaatgagatcaagtcccacctgaagtccctgccacagatggaaggcatcgacttcaacaatgccaacgtgacctatctgatcgccgagtacatgaagagagtgctggacgacgacttccagaccttctaccagtggaaccgcaactaccggtacatggacatgcttaagggcgagtacgacagaaagggctccctgcagcactgcttcaccagcgtggaagagagagaaggcctctggaaagagcgggcctccagaacagagcggtacagaaagcaggccagcaacaagatccgcagcaaccggcagatgagaaacgccagcagcgaagagatcgagacaatcctggataagcggctgagcaacagccggaacgagtaccagaaaagcgagaaagtgatccggcgctacagagtgcaggatgccctgctgtttctgctggccaaaaagaccctgaccgaactggccgatttcgacggcgagaggttcaaactgaaagaaatcatgcccgacgccgagaagggaatcctgagcgagatcatgcccatgagcttcaccttcgagaaaggcggcaagaagtacaccatcaccagcgagggcatgaagctgaagaactacggcgacttctttgtgctggctagcgacaagaggatcggcaacctgctggaactcgtgggcagcgacatcgtgtccaaagaggatatcatggaagagttcaacaaatacgaccagtgcaggcccgagatcagctccatcgtgttcaacctggaaaagtgggccttcgacacataccccgagctgtctgccagagtggaccgggaagagaaggtggacttcaagagcatcctgaaaatcctgctgaacaacaagaacatcaacaaagagcagagcgacatcctgcggaagatccggaacgccttcgatgcaaacaattaccccgacaaaggcgtggtggaaatcaaggccctgcctgagatcgccatgagcatcaagaaggcctttggggagtacgccatcatgaagtcgcgaggcggtggaggtagtggagggggaggatcaacgcgtggaggtagagatcacatggtactgcacgaatatgtaaatgctgcaggcatcactggtggctcaggagggcgcgaccacatggttttgcacgagtatgtgaacgccgccggaataacggggggttcaggaggccgggatcatatggttctccatgaatatgtcaacgcggctggtattacgggcggatcaggcgggcgggatcacatggttcttcacgaatacgtcaacgcggctggaattacaggtggttccggaggaagagatcacatggtactccacgaatatgttaatgctgcaggtataactggcggctctgggggtcgggatcatatggtgttgcatgaatacgtcaacgcagccgggataaccggaggttctggtggtcgagatcacatggtactccatgaatatgtaaatgcggctggaataacatagtaa

SEQ ID NO: 256 - DNA, 3888 bp, Artificial Sequence
  chemically synthesized
atggactacaaagaccatgacggtgattataaagatcatgacatcgattacaaggatgacgatgacaagggcggaatgtacaggatgcaactcctgtcttgcattgcactaagtcttgcacttgtcacgaattccggaggcaacatccccgctctggtggaaaaccagaagaagtactttggcacctacagcgtgatggccatgctgaacgctcagaccgtgctggaccacatccagaaggtggccgatattgagggcgagcagaacgagaacaacgagaatctgtggtttcaccccgtgatgagccacctgtacaacgccaagaacggctacgacaagcagcccgagaaaaccatgttcatcatcgagcggctgcagagctacttcccattcctgaagatcatggccgagaaccagagagagtacagcaacggcaagtacaagcagaaccgcgtggaagtgaacagcaacgacatcttcgaggtgctgaagcgcgccttcggcgtgctgaagatgtacagggacctgaccaacgcatacaagacctacgaggaaaagctgaacgacggctgcgagttcctgaccagcacagagcaacctctgagcggcatgatcaacaactactacacagtggccctgcggaacatgaacgagagatacggctacaagacagaggacctggccttcatccaggacaagcggttcaagttcgtgaaggacgcctacggcaagaaaaagtcccaagtgaataccggattcttcctgagcctgcaggactacaacggcgacacacagaagaagctgcacctgagcggagtgggaatcgccctgctgatctgcctgttcctggacaagcagtacatcaacatctttctgagcaggctgcccatcttctccagctacaatgcccagagcgaggaacggcggatcatcatcagatccttcggcatcaacagcatcaagctgcccaaggaccggatccacagcgagaagtccaacaagagcgtggccatggatatgctcaacgaagtgaagcggtgccccgacgagctgttcacaacactgtctgccgagaagcagtcccggttcagaatcatcagcgacgaccacaatgaagtgctgatgaagcggagcagcgacagattcgtgcctctgctgctgcagtatatcgattacggcaagctgttcgaccacatcaggttccacgtgaacatgggcaagctgagatacctgctgaaggccgacaagacctgcatcgacggccagaccagagtcagagtgatcgagcagcccctgaacggcttcggcagactggaagaggccgagacaatgcggaagcaagagaacggcaccttcggcaacagcggcatccggatcagagacttcgagaacatgaagcgggacgacgccaatcctgccaactatccctacatcgtggacacctacacacactacatcctggaaaacaacaaggtcgagatgtttatcaacgacaaagaggacagcgccccactgctgcccgtgatcgaggatgatagatacgtggtcaagacaatccccagctgccggatgagcaccctggaaattccagccatggccttccacatgtttctgttcggcagcaagaaaaccgagaagctgatcgtggacgtgcacaaccggtacaagagactgttccaggccatgcagaaagaagaagtgaccgccgagaatatcgccagcttcggaatcgccgagagcgacctgcctcagaagatcctggatctgatcagcggcaatgcccacggcaaggatgtggacgccttcatcagactgaccgtggacgacatgctgaccgacaccgagcggagaatcaagagattcaaggacgaccggaagtccattcggagcgccgacaacaagatgggaaagagaggcttcaagcagatctccacaggcaagctggccgacttcctggccaaggacatcgtgctgtttcagcccagcgtgaacgatggcgagaacaagatcaccggcctgaactaccggatcatgcagagcgccattgccgtgtacgatagcggcgacgattacgaggccaagcagcagttcaagctgatgttcgagaaggcccggctgatcggcaagggcacaacagagcctcatccatttctgtacaaggtgttcgcccgcagcatccccgccaatgccgtcgagttctacgagcgctacctgatcgagcggaagttctacctgaccggcctgtccaacgagatcaagaaaggcaacagagtggatgtgcccttcatccggcgggaccagaacaagtggaaaacacccgccatgaagaccctgggcagaatctacagcgaggatctgcccgtggaactgcccagacagatgttcgacaatgagatcaagtcccacctgaagtccctgccacagatggaaggcatcgacttcaacaatgccaacgtgacctatctgatcgccgagtacatgaagagagtgctggacgacgacttccagaccttctaccagtggaaccgcaactaccggtacatggacatgcttaagggcgagtacgacagaaagggctccctgcagcactgcttcaccagcgtggaagagagagaaggcctctggaaagagcgggcctccagaacagagcggtacagaaagcaggccagcaacaagatccgcagcaaccggcagatgagaaacgccagcagcgaagagatcgagacaatcctggataagcggctgagcaacagccggaacgagtaccagaaaagcgagaaagtgatccggcgctacagagtgcaggatgccctgctgtttctgctggccaaaaagaccctgaccgaactggccgatttcgacggcgagaggttcaaactgaaagaaatcatgcccgacgccgagaagggaatcctgagcgagatcatgcccatgagcttcaccttcgagaaaggcggcaagaagtacaccatcaccagcgagggcatgaagctgaagaactacggcgacttctttgtgctggctagcgacaagaggatcggcaacctgctggaactcgtgggcagcgacatcgtgtccaaagaggatatcatggaagagttcaacaaatacgaccagtgcaggcccgagatcagctccatcgtgttcaacctggaaaagtgggccttcgacacataccccgagctgtctgccagagtggaccgggaagagaaggtggacttcaagagcatcctgaaaatcctgctgaacaacaagaacatcaacaaagagcagagcgacatcctgcggaagatccggaacgccttcgatgcaaacaattaccccgacaaaggcgtggtggaaatcaaggccctgcctgagatcgccatgagcatcaagaaggcctttggggagtacgccatcatgaagtcgcgaggcggtggaggtagtggagggggaggatcaacgcgtggaggtagagatcacatggtactgcacgaatatgtaaatgctgcaggcatcactggtggctcaggagggcgcgaccacatggttttgcacgagtatgtgaacgccgccggaataacggggggttcaggaggccgggatcatatggttctccatgaatatgtcaacgcggctggtattacgggcggatcaggcgggcgggatcacatggttcttcacgaatacgtcaacgcggctggaattacaggtggttccggaggaagagatcacatggtactccacgaatatgttaatgctgcaggtataactggcggctctgggggtcgggatcatatggtgttgcatgaatacgtcaacgcagccgggataaccggaggttctggtggtcgagatcacatggtactccatgaatatgtaaatgcggctggaataacatagtaa

SEQ ID NO: 257 - DNA, 3957 bp, Artificial Sequence
  chemically synthesized
atggactacaaagaccatgacggtgattataaagatcatgacatcgattacaaggatgacgatgacaagggcggaatgggttgttgtttcagcaagacagcggcgaaaggtgaagcagcagcagaaagaccaggcgaggctgcggtagcatcaagtccctccaaggctaatgggcaggaaaacggacacgtcaaagttggaagcggaggcaacatccccgctctggtggaaaaccagaagaagtactttggcacctacagcgtgatggccatgctgaacgctcagaccgtgctggaccacatccagaaggtggccgatattgagggcgagcagaacgagaacaacgagaatctgtggtttcaccccgtgatgagccacctgtacaacgccaagaacggctacgacaagcagcccgagaaaaccatgttcatcatcgagcggctgcagagctacttcccattcctgaagatcatggccgagaaccagagagagtacagcaacggcaagtacaagcagaaccgcgtggaagtgaacagcaacgacatcttcgaggtgctgaagcgcgccttcggcgtgctgaagatgtacagggacctgaccaacgcatacaagacctacgaggaaaagctgaacgacggctgcgagttcctgaccagcacagagcaacctctgagcggcatgatcaacaactactacacagtggccctgcggaacatgaacgagagatacggctacaagacagaggacctggccttcatccaggacaagcggttcaagttcgtgaaggacgcctacggcaagaaaaagtcccaagtgaataccggattcttcctgagcctgcaggactacaacggcgacacacagaagaagctgcacctgagcggagtgggaatcgccctgctgatctgcctgttcctggacaagcagtacatcaacatctttctgagcaggctgcccatcttctccagctacaatgcccagagcgaggaacggcggatcatcatcagatccttcggcatcaacagcatcaagctgcccaaggaccggatccacagcgagaagtccaacaagagcgtggccatggatatgctcaacgaagtgaagcggtgccccgacgagctgttcacaacactgtctgccgagaagcagtcccggttcagaatcatcagcgacgaccacaatgaagtgctgatgaagcggagcagcgacagattcgtgcctctgctgctgcagtatatcgattacggcaagctgttcgaccacatcaggttccacgtgaacatgggcaagctgagatacctgctgaaggccgacaagacctgcatcgacggccagaccagagtcagagtgatcgagcagcccctgaacggcttcggcagactggaagaggccgagacaatgcggaagcaagagaacggcaccttcggcaacagcggcatccggatcagagacttcgagaacatgaagcgggacgacgccaatcctgccaactatccctacatcgtggacacctacacacactacatcctggaaaacaacaaggtcgagatgtttatcaacgacaaagaggacagcgccccactgctgcccgtgatcgaggatgatagatacgtggtcaagacaatccccagctgccggatgagcaccctggaaattccagccatggccttccacatgtttctgttcggcagcaagaaaaccgagaagctgatcgtggacgtgcacaaccggtacaagagactgttccaggccatgcagaaagaagaagtgaccgccgagaatatcgccagcttcggaatcgccgagagcgacctgcctcagaagatcctggatctgatcagcggcaatgcccacggcaaggatgtggacgccttcatcagactgaccgtggacgacatgctgaccgacaccgagcggagaatcaagagattcaaggacgaccggaagtccattcggagcgccgacaacaagatgggaaagagaggcttcaagcagatctccacaggcaagctggccgacttcctggccaaggacatcgtgctgtttcagcccagcgtgaacgatggcgagaacaagatcaccggcctgaactaccggatcatgcagagcgccattgccgtgtacgatagcggcgacgattacgaggccaagcagcagttcaagctgatgttcgagaaggcccggctgatcggcaagggcacaacagagcctcatccatttctgtacaaggtgttcgcccgcagcatccccgccaatgccgtcgagttctacgagcgctacctgatcgagcggaagttctacctgaccggcctgtccaacgagatcaagaaaggcaacagagtggatgtgcccttcatccggcgggaccagaacaagtggaaaacacccgccatgaagaccctgggcagaatctacagcgaggatctgcccgtggaactgcccagacagatgttcgacaatgagatcaagtcccacctgaagtccctgccacagatggaaggcatcgacttcaacaatgccaacgtgacctatctgatcgccgagtacatgaagagagtgctggacgacgacttccagaccttctaccagtggaaccgcaactaccggtacatggacatgcttaagggcgagtacgacagaaagggctccctgcagcactgcttcaccagcgtggaagagagagaaggcctctggaaagagcgggcctccagaacagagcggtacagaaagcaggccagcaacaagatccgcagcaaccggcagatgagaaacgccagcagcgaagagatcgagacaatcctggataagcggctgagcaacagccggaacgagtaccagaaaagcgagaaagtgatccggcgctacagagtgcaggatgccctgctgtttctgctggccaaaaagaccctgaccgaactggccgatttcgacggcgagaggttcaaactgaaagaaatcatgcccgacgccgagaagggaatcctgagcgagatcatgcccatgagcttcaccttcgagaaaggcggcaagaagtacaccatcaccagcgagggcatgaagctgaagaactacggcgacttctttgtgctggctagcgacaagaggatcggcaacctgctggaactcgtgggcagcgacatcgtgtccaaagaggatatcatggaagagttcaacaaatacgaccagtgcaggcccgagatcagctccatcgtgttcaacctggaaaagtgggccttcgacacataccccgagctgtctgccagagtggaccgggaagagaaggtggacttcaagagcatcctgaaaatcctgctgaacaacaagaacatcaacaaagagcagagcgacatcctgcggaagatccggaacgccttcgatgcaaacaattaccccgacaaaggcgtggtggaaatcaaggccctgcctgagatcgccatgagcatcaagaaggcctttggggagtacgccatcatgaagtcgcgaggcggtggaggtagtggagggggaggatcaacgcgtggaggtagagatcacatggtactgcacgaatatgtaaatgctgcaggcatcactggtggctcaggagggcgcgaccacatggttttgcacgagtatgtgaacgccgccggaataacggggggttcaggaggccgggatcatatggttctccatgaatatgtcaacgcggctggtattacgggcggatcaggcgggcgggatcacatggttcttcacgaatacgtcaacgcggctggaattacaggtggttccggaggaagagatcacatggtactccacgaatatgttaatgctgcaggtataactggcggctctgggggtcgggatcatatggtgttgcatgaatacgtcaacgcagccgggataaccggaggttctggtggtcgagatcacatggtactccatgaatatgtaaatgcggctggaataacatagtaa

SEQ ID NO: 258 - DNA, 3879 bp, Artificial Sequence
  chemically synthesized
atggactacaaagaccatgacggtgattataaagatcatgacatcgattacaaggatgacgatgacaagggcggaatgctgctgcccgtccccctgctgctgggcctgctgggcgccgccgccgacggaggcaacatccccgctctggtggaaaaccagaagaagtactttggcacctacagcgtgatggccatgctgaacgctcagaccgtgctggaccacatccagaaggtggccgatattgagggcgagcagaacgagaacaacgagaatctgtggtttcaccccgtgatgagccacctgtacaacgccaagaacggctacgacaagcagcccgagaaaaccatgttcatcatcgagcggctgcagagctacttcccattcctgaagatcatggccgagaaccagagagagtacagcaacggcaagtacaagcagaaccgcgtggaagtgaacagcaacgacatcttcgaggtgctgaagcgcgccttcggcgtgctgaagatgtacagggacctgaccaacgcatacaagacctacgaggaaaagctgaacgacggctgcgagttcctgaccagcacagagcaacctctgagcggcatgatcaacaactactacacagtggccctgcggaacatgaacgagagatacggctacaagacagaggacctggccttcatccaggacaagcggttcaagttcgtgaaggacgcctacggcaagaaaaagtcccaagtgaataccggattcttcctgagcctgcaggactacaacggcgacacacagaagaagctgcacctgagcggagtgggaatcgccctgctgatctgcctgttcctggacaagcagtacatcaacatctttctgagcaggctgcccatcttctccagctacaatgcccagagcgaggaacggcggatcatcatcagatccttcggcatcaacagcatcaagctgcccaaggaccggatccacagcgagaagtccaacaagagcgtggccatggatatgctcaacgaagtgaagcggtgccccgacgagctgttcacaacactgtctgccgagaagcagtcccggttcagaatcatcagcgacgaccacaatgaagtgctgatgaagcggagcagcgacagattcgtgcctctgctgctgcagtatatcgattacggcaagctgttcgaccacatcaggttccacgtgaacatgggcaagctgagatacctgctgaaggccgacaagacctgcatcgacggccagaccagagtcagagtgatcgagcagcccctgaacggcttcggcagactggaagaggccgagacaatgcggaagcaagagaacggcaccttcggcaacagcggcatccggatcagagacttcgagaacatgaagcgggacgacgccaatcctgccaactatccctacatcgtggacacctacacacactacatcctggaaaacaacaaggtcgagatgtttatcaacgacaaagaggacagcgccccactgctgcccgtgatcgaggatgatagatacgtggtcaagacaatccccagctgccggatgagcaccctggaaattccagccatggccttccacatgtttctgttcggcagcaagaaaaccgagaagctgatcgtggacgtgcacaaccggtacaagagactgttccaggccatgcagaaagaagaagtgaccgccgagaatatcgccagcttcggaatcgccgagagcgacctgcctcagaagatcctggatctgatcagcggcaatgcccacggcaaggatgtggacgccttcatcagactgaccgtggacgacatgctgaccgacaccgagcggagaatcaagagattcaaggacgaccggaagtccattcggagcgccgacaacaagatgggaaagagaggcttcaagcagatctccacaggcaagctggccgacttcctggccaaggacatcgtgctgtttcagcccagcgtgaacgatggcgagaacaagatcaccggcctgaactaccggatcatgcagagcgccattgccgtgtacgatagcggcgacgattacgaggccaagcagcagttcaagctgatgttcgagaaggcccggctgatcggcaagggcacaacagagcctcatccatttctgtacaaggtgttcgcccgcagcatccccgccaatgccgtcgagttctacgagcgctacctgatcgagcggaagttctacctgaccggcctgtccaacgagatcaagaaaggcaacagagtggatgtgcccttcatccggcgggaccagaacaagtggaaaacacccgccatgaagaccctgggcagaatctacagcgaggatctgcccgtggaactgcccagacagatgttcgacaatgagatcaagtcccacctgaagtccctgccacagatggaaggcatcgacttcaacaatgccaacgtgacctatctgatcgccgagtacatgaagagagtgctggacgacgacttccagaccttctaccagtggaaccgcaactaccggtacatggacatgcttaagggcgagtacgacagaaagggctccctgcagcactgcttcaccagcgtggaagagagagaaggcctctggaaagagcgggcctccagaacagagcggtacagaaagcaggccagcaacaagatccgcagcaaccggcagatgagaaacgccagcagcgaagagatcgagacaatcctggataagcggctgagcaacagccggaacgagtaccagaaaagcgagaaagtgatccggcgctacagagtgcaggatgccctgctgtttctgctggccaaaaagaccctgaccgaactggccgatttcgacggcgagaggttcaaactgaaagaaatcatgcccgacgccgagaagggaatcctgagcgagatcatgcccatgagcttcaccttcgagaaaggcggcaagaagtacaccatcaccagcgagggcatgaagctgaagaactacggcgacttctttgtgctggctagcgacaagaggatcggcaacctgctggaactcgtgggcagcgacatcgtgtccaaagaggatatcatggaagagttcaacaaatacgaccagtgcaggcccgagatcagctccatcgtgttcaacctggaaaagtgggccttcgacacataccccgagctgtctgccagagtggaccgggaagagaaggtggacttcaagagcatcctgaaaatcctgctgaacaacaagaacatcaacaaagagcagagcgacatcctgcggaagatccggaacgccttcgatgcaaacaattaccccgacaaaggcgtggtggaaatcaaggccctgcctgagatcgccatgagcatcaagaaggcctttggggagtacgccatcatgaagtcgcgaggcggtggaggtagtggagggggaggatcaacgcgtggaggtagagatcacatggtactgcacgaatatgtaaatgctgcaggcatcactggtggctcaggagggcgcgaccacatggttttgcacgagtatgtgaacgccgccggaataacggggggttcaggaggccgggatcatatggttctccatgaatatgtcaacgcggctggtattacgggcggatcaggcgggcgggatcacatggttcttcacgaatacgtcaacgcggctggaattacaggtggttccggaggaagagatcacatggtactccacgaatatgttaatgctgcaggtataactggcggctctgggggtcgggatcatatggtgttgcatgaatacgtcaacgcagccgggataaccggaggttctggtggtcgagatcacatggtactccatgaatatgtaaatgcggctggaataacatagtaa

SEQ ID NO: 259 - DNA, 3858 bp, Artificial Sequence
  chemically synthesized
atggactacaaagaccatgacggtgattataaagatcatgacatcgattacaaggatgacgatgacaagggcggagggatcactctcggcaaggacgagctgtaaggaggcaacatccccgctctggtggaaaaccagaagaagtactttggcacctacagcgtgatggccatgctgaacgctcagaccgtgctggaccacatccagaaggtggccgatattgagggcgagcagaacgagaacaacgagaatctgtggtttcaccccgtgatgagccacctgtacaacgccaagaacggctacgacaagcagcccgagaaaaccatgttcatcatcgagcggctgcagagctacttcccattcctgaagatcatggccgagaaccagagagagtacagcaacggcaagtacaagcagaaccgcgtggaagtgaacagcaacgacatcttcgaggtgctgaagcgcgccttcggcgtgctgaagatgtacagggacctgaccaacgcatacaagacctacgaggaaaagctgaacgacggctgcgagttcctgaccagcacagagcaacctctgagcggcatgatcaacaactactacacagtggccctgcggaacatgaacgagagatacggctacaagacagaggacctggccttcatccaggacaagcggttcaagttcgtgaaggacgcctacggcaagaaaaagtcccaagtgaataccggattcttcctgagcctgcaggactacaacggcgacacacagaagaagctgcacctgagcggagtgggaatcgccctgctgatctgcctgttcctggacaagcagtacatcaacatctttctgagcaggctgcccatcttctccagctacaatgcccagagcgaggaacggcggatcatcatcagatccttcggcatcaacagcatcaagctgcccaaggaccggatccacagcgagaagtccaacaagagcgtggccatggatatgctcaacgaagtgaagcggtgccccgacgagctgttcacaacactgtctgccgagaagcagtcccggttcagaatcatcagcgacgaccacaatgaagtgctgatgaagcggagcagcgacagattcgtgcctctgctgctgcagtatatcgattacggcaagctgttcgaccacatcaggttccacgtgaacatgggcaagctgagatacctgctgaaggccgacaagacctgcatcgacggccagaccagagtcagagtgatcgagcagcccctgaacggcttcggcagactggaagaggccgagacaatgcggaagcaagagaacggcaccttcggcaacagcggcatccggatcagagacttcgagaacatgaagcgggacgacgccaatcctgccaactatccctacatcgtggacacctacacacactacatcctggaaaacaacaaggtcgagatgtttatcaacgacaaagaggacagcgccccactgctgcccgtgatcgaggatgatagatacgtggtcaagacaatccccagctgccggatgagcaccctggaaattccagccatggccttccacatgtttctgttcggcagcaagaaaaccgagaagctgatcgtggacgtgcacaaccggtacaagagactgttccaggccatgcagaaagaagaagtgaccgccgagaatatcgccagcttcggaatcgccgagagcgacctgcctcagaagatcctggatctgatcagcggcaatgcccacggcaaggatgtggacgccttcatcagactgaccgtggacgacatgctgaccgacaccgagcggagaatcaagagattcaaggacgaccggaagtccattcggagcgccgacaacaagatgggaaagagaggcttcaagcagatctccacaggcaagctggccgacttcctggccaaggacatcgtgctgtttcagcccagcgtgaacgatggcgagaacaagatcaccggcctgaactaccggatcatgcagagcgccattgccgtgtacgatagcggcgacgattacgaggccaagcagcagttcaagctgatgttcgagaaggcccggctgatcggcaagggcacaacagagcctcatccatttctgtacaaggtgttcgcccgcagcatccccgccaatgccgtcgagttctacgagcgctacctgatcgagcggaagttctacctgaccggcctgtccaacgagatcaagaaaggcaacagagtggatgtgcccttcatccggcgggaccagaacaagtggaaaacacccgccatgaagaccctgggcagaatctacagcgaggatctgcccgtggaactgcccagacagatgttcgacaatgagatcaagtcccacctgaagtccctgccacagatggaaggcatcgacttcaacaatgccaacgtgacctatctgatcgccgagtacatgaagagagtgctggacgacgacttccagaccttctaccagtggaaccgcaactaccggtacatggacatgcttaagggcgagtacgacagaaagggctccctgcagcactgcttcaccagcgtggaagagagagaaggcctctggaaagagcgggcctccagaacagagcggtacagaaagcaggccagcaacaagatccgcagcaaccggcagatgagaaacgccagcagcgaagagatcgagacaatcctggataagcggctgagcaacagccggaacgagtaccagaaaagcgagaaagtgatccggcgctacagagtgcaggatgccctgctgtttctgctggccaaaaagaccctgaccgaactggccgatttcgacggcgagaggttcaaactgaaagaaatcatgcccgacgccgagaagggaatcctgagcgagatcatgcccatgagcttcaccttcgagaaaggcggcaagaagtacaccatcaccagcgagggcatgaagctgaagaactacggcgacttctttgtgctggctagcgacaagaggatcggcaacctgctggaactcgtgggcagcgacatcgtgtccaaagaggatatcatggaagagttcaacaaatacgaccagtgcaggcccgagatcagctccatcgtgttcaacctggaaaagtgggccttcgacacataccccgagctgtctgccagagtggaccgggaagagaaggtggacttcaagagcatcctgaaaatcctgctgaacaacaagaacatcaacaaagagcagagcgacatcctgcggaagatccggaacgccttcgatgcaaacaattaccccgacaaaggcgtggtggaaatcaaggccctgcctgagatcgccatgagcatcaagaaggcctttggggagtacgccatcatgaagtcgcgaggcggtggaggtagtggagggggaggatcaacgcgtggaggtagagatcacatggtactgcacgaatatgtaaatgctgcaggcatcactggtggctcaggagggcgcgaccacatggttttgcacgagtatgtgaacgccgccggaataacggggggttcaggaggccgggatcatatggttctccatgaatatgtcaacgcggctggtattacgggcggatcaggcgggcgggatcacatggttcttcacgaatacgtcaacgcggctggaattacaggtggttccggaggaagagatcacatggtactccacgaatatgttaatgctgcaggtataactggcggctctgggggtcgggatcatatggtgttgcatgaatacgtcaacgcagccgggataaccggaggttctggtggtcgagatcacatggtactccatgaatatgtaaatgcggctggaataacatagtaa

SEQ ID NO: 260 - DNA, 3840 bp, Artificial Sequence
  chemically synthesized
atggactacaaagaccatgacggtgattataaagatcatgacatcgattacaaggatgacgatgacaagggcggatccaaattataaggaggcaacatccccgctctggtggaaaaccagaagaagtactttggcacctacagcgtgatggccatgctgaacgctcagaccgtgctggaccacatccagaaggtggccgatattgagggcgagcagaacgagaacaacgagaatctgtggtttcaccccgtgatgagccacctgtacaacgccaagaacggctacgacaagcagcccgagaaaaccatgttcatcatcgagcggctgcagagctacttcccattcctgaagatcatggccgagaaccagagagagtacagcaacggcaagtacaagcagaaccgcgtggaagtgaacagcaacgacatcttcgaggtgctgaagcgcgccttcggcgtgctgaagatgtacagggacctgaccaacgcatacaagacctacgaggaaaagctgaacgacggctgcgagttcctgaccagcacagagcaacctctgagcggcatgatcaacaactactacacagtggccctgcggaacatgaacgagagatacggctacaagacagaggacctggccttcatccaggacaagcggttcaagttcgtgaaggacgcctacggcaagaaaaagtcccaagtgaataccggattcttcctgagcctgcaggactacaacggcgacacacagaagaagctgcacctgagcggagtgggaatcgccctgctgatctgcctgttcctggacaagcagtacatcaacatctttctgagcaggctgcccatcttctccagctacaatgcccagagcgaggaacggcggatcatcatcagatccttcggcatcaacagcatcaagctgcccaaggaccggatccacagcgagaagtccaacaagagcgtggccatggatatgctcaacgaagtgaagcggtgccccgacgagctgttcacaacactgtctgccgagaagcagtcccggttcagaatcatcagcgacgaccacaatgaagtgctgatgaagcggagcagcgacagattcgtgcctctgctgctgcagtatatcgattacggcaagctgttcgaccacatcaggttccacgtgaacatgggcaagctgagatacctgctgaaggccgacaagacctgcatcgacggccagaccagagtcagagtgatcgagcagcccctgaacggcttcggcagactggaagaggccgagacaatgcggaagcaagagaacggcaccttcggcaacagcggcatccggatcagagacttcgagaacatgaagcgggacgacgccaatcctgccaactatccctacatcgtggacacctacacacactacatcctggaaaacaacaaggtcgagatgtttatcaacgacaaagaggacagcgccccactgctgcccgtgatcgaggatgatagatacgtggtcaagacaatccccagctgccggatgagcaccctggaaattccagccatggccttccacatgtttctgttcggcagcaagaaaaccgagaagctgatcgtggacgtgcacaaccggtacaagagactgttccaggccatgcagaaagaagaagtgaccgccgagaatatcgccagcttcggaatcgccgagagcgacctgcctcagaagatcctggatctgatcagcggcaatgcccacggcaaggatgtggacgccttcatcagactgaccgtggacgacatgctgaccgacaccgagcggagaatcaagagattcaaggacgaccggaagtccattcggagcgccgacaacaagatgggaaagagaggcttcaagcagatctccacaggcaagctggccgacttcctggccaaggacatcgtgctgtttcagcccagcgtgaacgatggcgagaacaagatcaccggcctgaactaccggatcatgcagagcgccattgccgtgtacgatagcggcgacgattacgaggccaagcagcagttcaagctgatgttcgagaaggcccggctgatcggcaagggcacaacagagcctcatccatttctgtacaaggtgttcgcccgcagcatccccgccaatgccgtcgagttctacgagcgctacctgatcgagcggaagttctacctgaccggcctgtccaacgagatcaagaaaggcaacagagtggatgtgcccttcatccggcgggaccagaacaagtggaaaacacccgccatgaagaccctgggcagaatctacagcgaggatctgcccgtggaactgcccagacagatgttcgacaatgagatcaagtcccacctgaagtccctgccacagatggaaggcatcgacttcaacaatgccaacgtgacctatctgatcgccgagtacatgaagagagtgctggacgacgacttccagaccttctaccagtggaaccgcaactaccggtacatggacatgcttaagggcgagtacgacagaaagggctccctgcagcactgcttcaccagcgtggaagagagagaaggcctctggaaagagcgggcctccagaacagagcggtacagaaagcaggccagcaacaagatccgcagcaaccggcagatgagaaacgccagcagcgaagagatcgagacaatcctggataagcggctgagcaacagccggaacgagtaccagaaaagcgagaaagtgatccggcgctacagagtgcaggatgccctgctgtttctgctggccaaaaagaccctgaccgaactggccgatttcgacggcgagaggttcaaactgaaagaaatcatgcccgacgccgagaagggaatcctgagcgagatcatgcccatgagcttcaccttcgagaaaggcggcaagaagtacaccatcaccagcgagggcatgaagctgaagaactacggcgacttctttgtgctggctagcgacaagaggatcggcaacctgctggaactcgtgggcagcgacatcgtgtccaaagaggatatcatggaagagttcaacaaatacgaccagtgcaggcccgagatcagctccatcgtgttcaacctggaaaagtgggccttcgacacataccccgagctgtctgccagagtggaccgggaagagaaggtggacttcaagagcatcctgaaaatcctgctgaacaacaagaacatcaacaaagagcagagcgacatcctgcggaagatccggaacgccttcgatgcaaacaattaccccgacaaaggcgtggtggaaatcaaggccctgcctgagatcgccatgagcatcaagaaggcctttggggagtacgccatcatgaagtcgcgaggcggtggaggtagtggagggggaggatcaacgcgtggaggtagagatcacatggtactgcacgaatatgtaaatgctgcaggcatcactggtggctcaggagggcgcgaccacatggttttgcacgagtatgtgaacgccgccggaataacggggggttcaggaggccgggatcatatggttctccatgaatatgtcaacgcggctggtattacgggcggatcaggcgggcgggatcacatggttcttcacgaatacgtcaacgcggctggaattacaggtggttccggaggaagagatcacatggtactccacgaatatgttaatgctgcaggtataactggcggctctgggggtcgggatcatatggtgttgcatgaatacgtcaacgcagccgggataaccggaggttctggtggtcgagatcacatggtactccatgaatatgtaaatgcggctggaataacatagtaa

SEQ ID NO: 261 - DNA, 3624 bp, Artificial Sequence
  chemically synthesized
atggactacaaagaccatgacggtgattataaagatcatgacatcgattacaaggatgacgatgacaagggcggaaactcaaagaaaaggtcactggaggacaacgaaacggaaatcaaagtctccagagacacctggaacactaagaacatgcggtccctggaaccgccacgaagcaagaaacggatacatggaggcaacatccccgctctggtggaaaaccagaagaagtactttggcacctacagcgtgatggccatgctgaacgctcagaccgtgctggaccacatccagaaggtggccgatattgagggcgagcagaacgagaacaacgagaatctgtggtttcaccccgtgatgagccacctgtacaacgccaagaacggctacgacaagcagcccgagaaaaccatgttcatcatcgagcggctgcagagctacttcccattcctgaagatcatggccgagaaccagagagagtacagcaacggcaagtacaagcagaaccgcgtggaagtgaacagcaacgacatcttcgaggtgctgaagcgcgccttcggcgtgctgaagatgtacagggacctgaccaacgcatacaagacctacgaggaaaagctgaacgacggctgcgagttcctgaccagcacagagcaacctctgagcggcatgatcaacaactactacacagtggccctgcggaacatgaacgagagatacggctacaagacagaggacctggccttcatccaggacaagcggttcaagttcgtgaaggacgcctacggcaagaaaaagtcccaagtgaataccggattcttcctgagcctgcaggactacaacggcgacacacagaagaagctgcacctgagcggagtgggaatcgccctgctgatctgcctgttcctggacaagcagtacatcaacatctttctgagcaggctgcccatcttctccagctacaatgcccagagcgaggaacggcggatcatcatcagatccttcggcatcaacagcatcaagctgcccaaggaccggatccacagcgagaagtccaacaagagcgtggccatggatatgctcaacgaagtgaagcggtgccccgacgagctgttcacaacactgtctgccgagaagcagtcccggttcagaatcatcagcgacgaccacaatgaagtgctgatgaagcggagcagcgacagattcgtgcctctgctgctgcagtatatcgattacggcaagctgttcgaccacatcaggttccacgtgaacatgggcaagctgagatacctgctgaaggccgacaagacctgcatcgacggccagaccagagtcagagtgatcgagcagcccctgaacggcttcggcagactggaagaggccgagacaatgcggaagcaagagaacggcaccttcggcaacagcggcatccggatcagagacttcgagaacatgaagcgggacgacgccaatcctgccaactatccctacatcgtggacacctacacacactacatcctggaaaacaacaaggtcgagatgtttatcaacgacaaagaggacagcgccccactgctgcccgtgatcgaggatgatagatacgtggtcaagacaatccccagctgccggatgagcaccctggaaattccagccatggccttccacatgtttctgttcggcagcaagaaaaccgagaagctgatcgtggacgtgcacaaccggtacaagagactgttccaggccatgcagaaagaagaagtgaccgccgagaatatcgccagcttcggaatcgccgagagcgacctgcctcagaagatcctggatctgatcagcggcaatgcccacggcaaggatgtggacgccttcatcagactgaccgtggacgacatgctgaccgacaccgagcggagaatcaagagattcaaggacgaccggaagtccattcggagcgccgacaacaagatgggaaagagaggcttcaagcagatctccacaggcaagctggccgacttcctggccaaggacatcgtgctgtttcagcccagcgtgaacgatggcgagaacaagatcaccggcctgaactaccggatcatgcagagcgccattgccgtgtacgatagcggcgacgattacgaggccaagcagcagttcaagctgatgttcgagaaggcccggctgatcggcaagggcacaacagagcctcatccatttctgtacaaggtgttcgcccgcagcatccccgccaatgccgtcgagttctacgagcgctacctgatcgagcggaagttctacctgaccggcctgtccaacgagatcaagaaaggcaacagagtggatgtgcccttcatccggcgggaccagaacaagtggaaaacacccgccatgaagaccctgggcagaatctacagcgaggatctgcccgtggaactgcccagacagatgttcgacaatgagatcaagtcccacctgaagtccctgccacagatggaaggcatcgacttcaacaatgccaacgtgacctatctgatcgccgagtacatgaagagagtgctggacgacgacttccagaccttctaccagtggaaccgcaactaccggtacatggacatgcttaagggcgagtacgacagaaagggctccctgcagcactgcttcaccagcgtggaagagagagaaggcctctggaaagagcgggcctccagaacagagcggtacagaaagcaggccagcaacaagatccgcagcaaccggcagatgagaaacgccagcagcgaagagatcgagacaatcctggataagcggctgagcaacagccggaacgagtaccagaaaagcgagaaagtgatccggcgctacagagtgcaggatgccctgctgtttctgctggccaaaaagaccctgaccgaactggccgatttcgacggcgagaggttcaaactgaaagaaatcatgcccgacgccgagaagggaatcctgagcgagatcatgcccatgagcttcaccttcgagaaaggcggcaagaagtacaccatcaccagcgagggcatgaagctgaagaactacggcgacttctttgtgctggctagcgacaagaggatcggcaacctgctggaactcgtgggcagcgacatcgtgtccaaagaggattcgcgaggcggtggaggtagtggagggggaggatcaacgcgtggaggtagagatcacatggtactgcacgaatatgtaaatgctgcaggcatcactggtggctcaggagggcgcgaccacatggttttgcacgagtatgtgaacgccgccggaataacggggggttcaggaggccgggatcatatggttctccatgaatatgtcaacgcggctggtattacgggcggatcaggcgggcgggatcacatggttcttcacgaatacgtcaacgcggctggaattacaggtggttccggaggaagagatcacatggtactccacgaatatgttaatgctgcaggtataactggcggctctgggggtcgggatcatatggtgttgcatgaatacgtcaacgcagccgggataaccggaggttctggtggtcgagatcacatggtactccatgaatatgtaaatgcggctggaataacatagtaa

SEQ ID NO: 262 - DNA, 3540 bp, Artificial Sequence
  chemically synthesized
atggactacaaagaccatgacggtgattataaagatcatgacatcgattacaaggatgacgatgacaagggcggacttcaactgcctccacttgaaagactgacactgggaggcaacatccccgctctggtggaaaaccagaagaagtactttggcacctacagcgtgatggccatgctgaacgctcagaccgtgctggaccacatccagaaggtggccgatattgagggcgagcagaacgagaacaacgagaatctgtggtttcaccccgtgatgagccacctgtacaacgccaagaacggctacgacaagcagcccgagaaaaccatgttcatcatcgagcggctgcagagctacttcccattcctgaagatcatggccgagaaccagagagagtacagcaacggcaagtacaagcagaaccgcgtggaagtgaacagcaacgacatcttcgaggtgctgaagcgcgccttcggcgtgctgaagatgtacagggacctgaccaacgcatacaagacctacgaggaaaagctgaacgacggctgcgagttcctgaccagcacagagcaacctctgagcggcatgatcaacaactactacacagtggccctgcggaacatgaacgagagatacggctacaagacagaggacctggccttcatccaggacaagcggttcaagttcgtgaaggacgcctacggcaagaaaaagtcccaagtgaataccggattcttcctgagcctgcaggactacaacggcgacacacagaagaagctgcacctgagcggagtgggaatcgccctgctgatctgcctgttcctggacaagcagtacatcaacatctttctgagcaggctgcccatcttctccagctacaatgcccagagcgaggaacggcggatcatcatcagatccttcggcatcaacagcatcaagctgcccaaggaccggatccacagcgagaagtccaacaagagcgtggccatggatatgctcaacgaagtgaagcggtgccccgacgagctgttcacaacactgtctgccgagaagcagtcccggttcagaatcatcagcgacgaccacaatgaagtgctgatgaagcggagcagcgacagattcgtgcctctgctgctgcagtatatcgattacggcaagctgttcgaccacatcaggttccacgtgaacatgggcaagctgagatacctgctgaaggccgacaagacctgcatcgacggccagaccagagtcagagtgatcgagcagcccctgaacggcttcggcagactggaagaggccgagacaatgcggaagcaagagaacggcaccttcggcaacagcggcatccggatcagagacttcgagaacatgaagcgggacgacgccaatcctgccaactatccctacatcgtggacacctacacacactacatcctggaaaacaacaaggtcgagatgtttatcaacgacaaagaggacagcgccccactgctgcccgtgatcgaggatgatagatacgtggtcaagacaatccccagctgccggatgagcaccctggaaattccagccatggccttccacatgtttctgttcggcagcaagaaaaccgagaagctgatcgtggacgtgcacaaccggtacaagagactgttccaggccatgcagaaagaagaagtgaccgccgagaatatcgccagcttcggaatcgccgagagcgacctgcctcagaagatcctggatctgatcagcggcaatgcccacggcaaggatgtggacgccttcatcagactgaccgtggacgacatgctgaccgacaccgagcggagaatcaagagattcaaggacgaccggaagtccattcggagcgccgacaacaagatgggaaagagaggcttcaagcagatctccacaggcaagctggccgacttcctggccaaggacatcgtgctgtttcagcccagcgtgaacgatggcgagaacaagatcaccggcctgaactaccggatcatgcagagcgccattgccgtgtacgatagcggcgacgattacgaggccaagcagcagttcaagctgatgttcgagaaggcccggctgatcggcaagggcacaacagagcctcatccatttctgtacaaggtgttcgcccgcagcatccccgccaatgccgtcgagttctacgagcgctacctgatcgagcggaagttctacctgaccggcctgtccaacgagatcaagaaaggcaacagagtggatgtgcccttcatccggcgggaccagaacaagtggaaaacacccgccatgaagaccctgggcagaatctacagcgaggatctgcccgtggaactgcccagacagatgttcgacaatgagatcaagtcccacctgaagtccctgccacagatggaaggcatcgacttcaacaatgccaacgtgacctatctgatcgccgagtacatgaagagagtgctggacgacgacttccagaccttctaccagtggaaccgcaactaccggtacatggacatgcttaagggcgagtacgacagaaagggctccctgcagcactgcttcaccagcgtggaagagagagaaggcctctggaaagagcgggcctccagaacagagcggtacagaaagcaggccagcaacaagatccgcagcaaccggcagatgagaaacgccagcagcgaagagatcgagacaatcctggataagcggctgagcaacagccggaacgagtaccagaaaagcgagaaagtgatccggcgctacagagtgcaggatgccctgctgtttctgctggccaaaaagaccctgaccgaactggccgatttcgacggcgagaggttcaaactgaaagaaatcatgcccgacgccgagaagggaatcctgagcgagatcatgcccatgagcttcaccttcgagaaaggcggcaagaagtacaccatcaccagcgagggcatgaagctgaagaactacggcgacttctttgtgctggctagcgacaagaggatcggcaacctgctggaactcgtgggcagcgacatcgtgtccaaagaggattcgcgaggcggtggaggtagtggagggggaggatcaacgcgtggaggtagagatcacatggtactgcacgaatatgtaaatgctgcaggcatcactggtggctcaggagggcgcgaccacatggttttgcacgagtatgtgaacgccgccggaataacggggggttcaggaggccgggatcatatggttctccatgaatatgtcaacgcggctggtattacgggcggatcaggcgggcgggatcacatggttcttcacgaatacgtcaacgcggctggaattacaggtggttccggaggaagagatcacatggtactccacgaatatgttaatgctgcaggtataactggcggctctgggggtcgggatcatatggtgttgcatgaatacgtcaacgcagccgggataaccggaggttctggtggtcgagatcacatggtactccatgaatatgtaaatgcggctggaataacatagtaa

SEQ ID NO: 263 - DNA, 3555 bp, Artificial Sequence
  chemically synthesized
atggactacaaagaccatgacggtgattataaagatcatgacatcgattacaaggatgacgatgacaagggcggaggatcccttcaactgcctccacttgaaagactgacactgggtagttccggaggcaacatccccgctctggtggaaaaccagaagaagtactttggcacctacagcgtgatggccatgctgaacgctcagaccgtgctggaccacatccagaaggtggccgatattgagggcgagcagaacgagaacaacgagaatctgtggtttcaccccgtgatgagccacctgtacaacgccaagaacggctacgacaagcagcccgagaaaaccatgttcatcatcgagcggctgcagagctacttcccattcctgaagatcatggccgagaaccagagagagtacagcaacggcaagtacaagcagaaccgcgtggaagtgaacagcaacgacatcttcgaggtgctgaagcgcgccttcggcgtgctgaagatgtacagggacctgaccaacgcatacaagacctacgaggaaaagctgaacgacggctgcgagttcctgaccagcacagagcaacctctgagcggcatgatcaacaactactacacagtggccctgcggaacatgaacgagagatacggctacaagacagaggacctggccttcatccaggacaagcggttcaagttcgtgaaggacgcctacggcaagaaaaagtcccaagtgaataccggattcttcctgagcctgcaggactacaacggcgacacacagaagaagctgcacctgagcggagtgggaatcgccctgctgatctgcctgttcctggacaagcagtacatcaacatctttctgagcaggctgcccatcttctccagctacaatgcccagagcgaggaacggcggatcatcatcagatccttcggcatcaacagcatcaagctgcccaaggaccggatccacagcgagaagtccaacaagagcgtggccatggatatgctcaacgaagtgaagcggtgccccgacgagctgttcacaacactgtctgccgagaagcagtcccggttcagaatcatcagcgacgaccacaatgaagtgctgatgaagcggagcagcgacagattcgtgcctctgctgctgcagtatatcgattacggcaagctgttcgaccacatcaggttccacgtgaacatgggcaagctgagatacctgctgaaggccgacaagacctgcatcgacggccagaccagagtcagagtgatcgagcagcccctgaacggcttcggcagactggaagaggccgagacaatgcggaagcaagagaacggcaccttcggcaacagcggcatccggatcagagacttcgagaacatgaagcgggacgacgccaatcctgccaactatccctacatcgtggacacctacacacactacatcctggaaaacaacaaggtcgagatgtttatcaacgacaaagaggacagcgccccactgctgcccgtgatcgaggatgatagatacgtggtcaagacaatccccagctgccggatgagcaccctggaaattccagccatggccttccacatgtttctgttcggcagcaagaaaaccgagaagctgatcgtggacgtgcacaaccggtacaagagactgttccaggccatgcagaaagaagaagtgaccgccgagaatatcgccagcttcggaatcgccgagagcgacctgcctcagaagatcctggatctgatcagcggcaatgcccacggcaaggatgtggacgccttcatcagactgaccgtggacgacatgctgaccgacaccgagcggagaatcaagagattcaaggacgaccggaagtccattcggagcgccgacaacaagatgggaaagagaggcttcaagcagatctccacaggcaagctggccgacttcctggccaaggacatcgtgctgtttcagcccagcgtgaacgatggcgagaacaagatcaccggcctgaactaccggatcatgcagagcgccattgccgtgtacgatagcggcgacgattacgaggccaagcagcagttcaagctgatgttcgagaaggcccggctgatcggcaagggcacaacagagcctcatccatttctgtacaaggtgttcgcccgcagcatccccgccaatgccgtcgagttctacgagcgctacctgatcgagcggaagttctacctgaccggcctgtccaacgagatcaagaaaggcaacagagtggatgtgcccttcatccggcgggaccagaacaagtggaaaacacccgccatgaagaccctgggcagaatctacagcgaggatctgcccgtggaactgcccagacagatgttcgacaatgagatcaagtcccacctgaagtccctgccacagatggaaggcatcgacttcaacaatgccaacgtgacctatctgatcgccgagtacatgaagagagtgctggacgacgacttccagaccttctaccagtggaaccgcaactaccggtacatggacatgcttaagggcgagtacgacagaaagggctccctgcagcactgcttcaccagcgtggaagagagagaaggcctctggaaagagcgggcctccagaacagagcggtacagaaagcaggccagcaacaagatccgcagcaaccggcagatgagaaacgccagcagcgaagagatcgagacaatcctggataagcggctgagcaacagccggaacgagtaccagaaaagcgagaaagtgatccggcgctacagagtgcaggatgccctgctgtttctgctggccaaaaagaccctgaccgaactggccgatttcgacggcgagaggttcaaactgaaagaaatcatgcccgacgccgagaagggaatcctgagcgagatcatgcccatgagcttcaccttcgagaaaggcggcaagaagtacaccatcaccagcgagggcatgaagctgaagaactacggcgacttctttgtgctggctagcgacaagaggatcggcaacctgctggaactcgtgggcagcgacatcgtgtccaaagaggattcgcgaggcggtggaggtagtggagggggaggatcaacgcgtggaggtagagatcacatggtactgcacgaatatgtaaatgctgcaggcatcactggtggctcaggagggcgcgaccacatggttttgcacgagtatgtgaacgccgccggaataacggggggttcaggaggccgggatcatatggttctccatgaatatgtcaacgcggctggtattacgggcggatcaggcgggcgggatcacatggttcttcacgaatacgtcaacgcggctggaattacaggtggttccggaggaagagatcacatggtactccacgaatatgttaatgctgcaggtataactggcggctctgggggtcgggatcatatggtgttgcatgaatacgtcaacgcagccgggataaccggaggttctggtggtcgagatcacatggtactccatgaatatgtaaatgcggctggaataacatagtaa

SEQ ID NO: 264 - DNA, 3603 bp, Artificial Sequence
  chemically synthesized
atggactacaaagaccatgacggtgattataaagatcatgacatcgattacaaggatgacgatgacaagggcggaatgagtgtgttgacgccgttgcttctgcgagggcttaccgggtctgctagaagacttccggtccccagggccaagatacatagcctcggagacccgggaggcaacatccccgctctggtggaaaaccagaagaagtactttggcacctacagcgtgatggccatgctgaacgctcagaccgtgctggaccacatccagaaggtggccgatattgagggcgagcagaacgagaacaacgagaatctgtggtttcaccccgtgatgagccacctgtacaacgccaagaacggctacgacaagcagcccgagaaaaccatgttcatcatcgagcggctgcagagctacttcccattcctgaagatcatggccgagaaccagagagagtacagcaacggcaagtacaagcagaaccgcgtggaagtgaacagcaacgacatcttcgaggtgctgaagcgcgccttcggcgtgctgaagatgtacagggacctgaccaacgcatacaagacctacgaggaaaagctgaacgacggctgcgagttcctgaccagcacagagcaacctctgagcggcatgatcaacaactactacacagtggccctgcggaacatgaacgagagatacggctacaagacagaggacctggccttcatccaggacaagcggttcaagttcgtgaaggacgcctacggcaagaaaaagtcccaagtgaataccggattcttcctgagcctgcaggactacaacggcgacacacagaagaagctgcacctgagcggagtgggaatcgccctgctgatctgcctgttcctggacaagcagtacatcaacatctttctgagcaggctgcccatcttctccagctacaatgcccagagcgaggaacggcggatcatcatcagatccttcggcatcaacagcatcaagctgcccaaggaccggatccacagcgagaagtccaacaagagcgtggccatggatatgctcaacgaagtgaagcggtgccccgacgagctgttcacaacactgtctgccgagaagcagtcccggttcagaatcatcagcgacgaccacaatgaagtgctgatgaagcggagcagcgacagattcgtgcctctgctgctgcagtatatcgattacggcaagctgttcgaccacatcaggttccacgtgaacatgggcaagctgagatacctgctgaaggccgacaagacctgcatcgacggccagaccagagtcagagtgatcgagcagcccctgaacggcttcggcagactggaagaggccgagacaatgcggaagcaagagaacggcaccttcggcaacagcggcatccggatcagagacttcgagaacatgaagcgggacgacgccaatcctgccaactatccctacatcgtggacacctacacacactacatcctggaaaacaacaaggtcgagatgtttatcaacgacaaagaggacagcgccccactgctgcccgtgatcgaggatgatagatacgtggtcaagacaatccccagctgccggatgagcaccctggaaattccagccatggccttccacatgtttctgttcggcagcaagaaaaccgagaagctgatcgtggacgtgcacaaccggtacaagagactgttccaggccatgcagaaagaagaagtgaccgccgagaatatcgccagcttcggaatcgccgagagcgacctgcctcagaagatcctggatctgatcagcggcaatgcccacggcaaggatgtggacgccttcatcagactgaccgtggacgacatgctgaccgacaccgagcggagaatcaagagattcaaggacgaccggaagtccattcggagcgccgacaacaagatgggaaagagaggcttcaagcagatctccacaggcaagctggccgacttcctggccaaggacatcgtgctgtttcagcccagcgtgaacgatggcgagaacaagatcaccggcctgaactaccggatcatgcagagcgccattgccgtgtacgatagcggcgacgattacgaggccaagcagcagttcaagctgatgttcgagaaggcccggctgatcggcaagggcacaacagagcctcatccatttctgtacaaggtgttcgcccgcagcatccccgccaatgccgtcgagttctacgagcgctacctgatcgagcggaagttctacctgaccggcctgtccaacgagatcaagaaaggcaacagagtggatgtgcccttcatccggcgggaccagaacaagtggaaaacacccgccatgaagaccctgggcagaatctacagcgaggatctgcccgtggaactgcccagacagatgttcgacaatgagatcaagtcccacctgaagtccctgccacagatggaaggcatcgacttcaacaatgccaacgtgacctatctgatcgccgagtacatgaagagagtgctggacgacgacttccagaccttctaccagtggaaccgcaactaccggtacatggacatgcttaagggcgagtacgacagaaagggctccctgcagcactgcttcaccagcgtggaagagagagaaggcctctggaaagagcgggcctccagaacagagcggtacagaaagcaggccagcaacaagatccgcagcaaccggcagatgagaaacgccagcagcgaagagatcgagacaatcctggataagcggctgagcaacagccggaacgagtaccagaaaagcgagaaagtgatccggcgctacagagtgcaggatgccctgctgtttctgctggccaaaaagaccctgaccgaactggccgatttcgacggcgagaggttcaaactgaaagaaatcatgcccgacgccgagaagggaatcctgagcgagatcatgcccatgagcttcaccttcgagaaaggcggcaagaagtacaccatcaccagcgagggcatgaagctgaagaactacggcgacttctttgtgctggctagcgacaagaggatcggcaacctgctggaactcgtgggcagcgacatcgtgtccaaagaggattcgcgaggcggtggaggtagtggagggggaggatcaacgcgtggaggtagagatcacatggtactgcacgaatatgtaaatgctgcaggcatcactggtggctcaggagggcgcgaccacatggttttgcacgagtatgtgaacgccgccggaataacggggggttcaggaggccgggatcatatggttctccatgaatatgtcaacgcggctggtattacgggcggatcaggcgggcgggatcacatggttcttcacgaatacgtcaacgcggctggaattacaggtggttccggaggaagagatcacatggtactccacgaatatgttaatgctgcaggtataactggcggctctgggggtcgggatcatatggtgttgcatgaatacgtcaacgcagccgggataaccggaggttctggtggtcgagatcacatggtactccatgaatatgtaaatgcggctggaataacatagtaa

SEQ ID NO: 265 - DNA, 3897 bp, Artificial Sequence
  chemically synthesized
atggactacaaagaccatgacggtgattataaagatcatgacatcgattacaaggatgacgatgacaagggcggaatgagtgtgttgacgccgttgcttctgcgagggcttaccgggtctgctagaagacttccggtccccagggccaagatacatagcctcggagacccgatgtctgtgctcactcctctgcttttgcgaggactgactgggtccgccagacgactcccggtgccgagagctaaaatccatagcctgggaaaattggcaactatgtcagtcctgacgccgcttcttctccggggtcttacagggtctgcaagaaggctgcctgtacctcgggcgaaaattcatagcttgggcgacccgatgagtgtattgacgcccctgttgctgagaggattgactgggtcagcgcgccggctccctgtcccccgagctaagattcactcccttggtaagctgggaggcaacatccccgctctggtggaaaaccagaagaagtactttggcacctacagcgtgatggccatgctgaacgctcagaccgtgctggaccacatccagaaggtggccgatattgagggcgagcagaacgagaacaacgagaatctgtggtttcaccccgtgatgagccacctgtacaacgccaagaacggctacgacaagcagcccgagaaaaccatgttcatcatcgagcggctgcagagctacttcccattcctgaagatcatggccgagaaccagagagagtacagcaacggcaagtacaagcagaaccgcgtggaagtgaacagcaacgacatcttcgaggtgctgaagcgcgccttcggcgtgctgaagatgtacagggacctgaccaacgcatacaagacctacgaggaaaagctgaacgacggctgcgagttcctgaccagcacagagcaacctctgagcggcatgatcaacaactactacacagtggccctgcggaacatgaacgagagatacggctacaagacagaggacctggccttcatccaggacaagcggttcaagttcgtgaaggacgcctacggcaagaaaaagtcccaagtgaataccggattcttcctgagcctgcaggactacaacggcgacacacagaagaagctgcacctgagcggagtgggaatcgccctgctgatctgcctgttcctggacaagcagtacatcaacatctttctgagcaggctgcccatcttctccagctacaatgcccagagcgaggaacggcggatcatcatcagatccttcggcatcaacagcatcaagctgcccaaggaccggatccacagcgagaagtccaacaagagcgtggccatggatatgctcaacgaagtgaagcggtgccccgacgagctgttcacaacactgtctgccgagaagcagtcccggttcagaatcatcagcgacgaccacaatgaagtgctgatgaagcggagcagcgacagattcgtgcctctgctgctgcagtatatcgattacggcaagctgttcgaccacatcaggttccacgtgaacatgggcaagctgagatacctgctgaaggccgacaagacctgcatcgacggccagaccagagtcagagtgatcgagcagcccctgaacggcttcggcagactggaagaggccgagacaatgcggaagcaagagaacggcaccttcggcaacagcggcatccggatcagagacttcgagaacatgaagcgggacgacgccaatcctgccaactatccctacatcgtggacacctacacacactacatcctggaaaacaacaaggtcgagatgtttatcaacgacaaagaggacagcgccccactgctgcccgtgatcgaggatgatagatacgtggtcaagacaatccccagctgccggatgagcaccctggaaattccagccatggccttccacatgtttctgttcggcagcaagaaaaccgagaagctgatcgtggacgtgcacaaccggtacaagagactgttccaggccatgcagaaagaagaagtgaccgccgagaatatcgccagcttcggaatcgccgagagcgacctgcctcagaagatcctggatctgatcagcggcaatgcccacggcaaggatgtggacgccttcatcagactgaccgtggacgacatgctgaccgacaccgagcggagaatcaagagattcaaggacgaccggaagtccattcggagcgccgacaacaagatgggaaagagaggcttcaagcagatctccacaggcaagctggccgacttcctggccaaggacatcgtgctgtttcagcccagcgtgaacgatggcgagaacaagatcaccggcctgaactaccggatcatgcagagcgccattgccgtgtacgatagcggcgacgattacgaggccaagcagcagttcaagctgatgttcgagaaggcccggctgatcggcaagggcacaacagagcctcatccatttctgtacaaggtgttcgcccgcagcatccccgccaatgccgtcgagttctacgagcgctacctgatcgagcggaagttctacctgaccggcctgtccaacgagatcaagaaaggcaacagagtggatgtgcccttcatccggcgggaccagaacaagtggaaaacacccgccatgaagaccctgggcagaatctacagcgaggatctgcccgtggaactgcccagacagatgttcgacaatgagatcaagtcccacctgaagtccctgccacagatggaaggcatcgacttcaacaatgccaacgtgacctatctgatcgccgagtacatgaagagagtgctggacgacgacttccagaccttctaccagtggaaccgcaactaccggtacatggacatgcttaagggcgagtacgacagaaagggctccctgcagcactgcttcaccagcgtggaagagagagaaggcctctggaaagagcgggcctccagaacagagcggtacagaaagcaggccagcaacaagatccgcagcaaccggcagatgagaaacgccagcagcgaagagatcgagacaatcctggataagcggctgagcaacagccggaacgagtaccagaaaagcgagaaagtgatccggcgctacagagtgcaggatgccctgctgtttctgctggccaaaaagaccctgaccgaactggccgatttcgacggcgagaggttcaaactgaaagaaatcatgcccgacgccgagaagggaatcctgagcgagatcatgcccatgagcttcaccttcgagaaaggcggcaagaagtacaccatcaccagcgagggcatgaagctgaagaactacggcgacttctttgtgctggctagcgacaagaggatcggcaacctgctggaactcgtgggcagcgacatcgtgtccaaagaggattcgcgaggcggtggaggtagtggagggggaggatcaacgcgtggaggtagagatcacatggtactgcacgaatatgtaaatgctgcaggcatcactggtggctcaggagggcgcgaccacatggttttgcacgagtatgtgaacgccgccggaataacggggggttcaggaggccgggatcatatggttctccatgaatatgtcaacgcggctggtattacgggcggatcaggcgggcgggatcacatggttcttcacgaatacgtcaacgcggctggaattacaggtggttccggaggaagagatcacatggtactccacgaatatgttaatgctgcaggtataactggcggctctgggggtcgggatcatatggtgttgcatgaatacgtcaacgcagccgggataaccggaggttctggtggtcgagatcacatggtactccatgaatatgtaaatgcggctggaataacatagtaa

SEQ ID NO: 266 - DNA, 3567 bp, Artificial Sequence
  chemically synthesized
atggactacaaagaccatgacggtgattataaagatcatgacatcgattacaaggatgacgatgacaagggcggaatgtacaggatgcaactcctgtcttgcattgcactaagtcttgcacttgtcacgaattccggaggcaacatccccgctctggtggaaaaccagaagaagtactttggcacctacagcgtgatggccatgctgaacgctcagaccgtgctggaccacatccagaaggtggccgatattgagggcgagcagaacgagaacaacgagaatctgtggtttcaccccgtgatgagccacctgtacaacgccaagaacggctacgacaagcagcccgagaaaaccatgttcatcatcgagcggctgcagagctacttcccattcctgaagatcatggccgagaaccagagagagtacagcaacggcaagtacaagcagaaccgcgtggaagtgaacagcaacgacatcttcgaggtgctgaagcgcgccttcggcgtgctgaagatgtacagggacctgaccaacgcatacaagacctacgaggaaaagctgaacgacggctgcgagttcctgaccagcacagagcaacctctgagcggcatgatcaacaactactacacagtggccctgcggaacatgaacgagagatacggctacaagacagaggacctggccttcatccaggacaagcggttcaagttcgtgaaggacgcctacggcaagaaaaagtcccaagtgaataccggattcttcctgagcctgcaggactacaacggcgacacacagaagaagctgcacctgagcggagtgggaatcgccctgctgatctgcctgttcctggacaagcagtacatcaacatctttctgagcaggctgcccatcttctccagctacaatgcccagagcgaggaacggcggatcatcatcagatccttcggcatcaacagcatcaagctgcccaaggaccggatccacagcgagaagtccaacaagagcgtggccatggatatgctcaacgaagtgaagcggtgccccgacgagctgttcacaacactgtctgccgagaagcagtcccggttcagaatcatcagcgacgaccacaatgaagtgctgatgaagcggagcagcgacagattcgtgcctctgctgctgcagtatatcgattacggcaagctgttcgaccacatcaggttccacgtgaacatgggcaagctgagatacctgctgaaggccgacaagacctgcatcgacggccagaccagagtcagagtgatcgagcagcccctgaacggcttcggcagactggaagaggccgagacaatgcggaagcaagagaacggcaccttcggcaacagcggcatccggatcagagacttcgagaacatgaagcgggacgacgccaatcctgccaactatccctacatcgtggacacctacacacactacatcctggaaaacaacaaggtcgagatgtttatcaacgacaaagaggacagcgccccactgctgcccgtgatcgaggatgatagatacgtggtcaagacaatccccagctgccggatgagcaccctggaaattccagccatggccttccacatgtttctgttcggcagcaagaaaaccgagaagctgatcgtggacgtgcacaaccggtacaagagactgttccaggccatgcagaaagaagaagtgaccgccgagaatatcgccagcttcggaatcgccgagagcgacctgcctcagaagatcctggatctgatcagcggcaatgcccacggcaaggatgtggacgccttcatcagactgaccgtggacgacatgctgaccgacaccgagcggagaatcaagagattcaaggacgaccggaagtccattcggagcgccgacaacaagatgggaaagagaggcttcaagcagatctccacaggcaagctggccgacttcctggccaaggacatcgtgctgtttcagcccagcgtgaacgatggcgagaacaagatcaccggcctgaactaccggatcatgcagagcgccattgccgtgtacgatagcggcgacgattacgaggccaagcagcagttcaagctgatgttcgagaaggcccggctgatcggcaagggcacaacagagcctcatccatttctgtacaaggtgttcgcccgcagcatccccgccaatgccgtcgagttctacgagcgctacctgatcgagcggaagttctacctgaccggcctgtccaacgagatcaagaaaggcaacagagtggatgtgcccttcatccggcgggaccagaacaagtggaaaacacccgccatgaagaccctgggcagaatctacagcgaggatctgcccgtggaactgcccagacagatgttcgacaatgagatcaagtcccacctgaagtccctgccacagatggaaggcatcgacttcaacaatgccaacgtgacctatctgatcgccgagtacatgaagagagtgctggacgacgacttccagaccttctaccagtggaaccgcaactaccggtacatggacatgcttaagggcgagtacgacagaaagggctccctgcagcactgcttcaccagcgtggaagagagagaaggcctctggaaagagcgggcctccagaacagagcggtacagaaagcaggccagcaacaagatccgcagcaaccggcagatgagaaacgccagcagcgaagagatcgagacaatcctggataagcggctgagcaacagccggaacgagtaccagaaaagcgagaaagtgatccggcgctacagagtgcaggatgccctgctgtttctgctggccaaaaagaccctgaccgaactggccgatttcgacggcgagaggttcaaactgaaagaaatcatgcccgacgccgagaagggaatcctgagcgagatcatgcccatgagcttcaccttcgagaaaggcggcaagaagtacaccatcaccagcgagggcatgaagctgaagaactacggcgacttctttgtgctggctagcgacaagaggatcggcaacctgctggaactcgtgggcagcgacatcgtgtccaaagaggattcgcgaggcggtggaggtagtggagggggaggatcaacgcgtggaggtagagatcacatggtactgcacgaatatgtaaatgctgcaggcatcactggtggctcaggagggcgcgaccacatggttttgcacgagtatgtgaacgccgccggaataacggggggttcaggaggccgggatcatatggttctccatgaatatgtcaacgcggctggtattacgggcggatcaggcgggcgggatcacatggttcttcacgaatacgtcaacgcggctggaattacaggtggttccggaggaagagatcacatggtactccacgaatatgttaatgctgcaggtataactggcggctctgggggtcgggatcatatggtgttgcatgaatacgtcaacgcagccgggataaccggaggttctggtggtcgagatcacatggtactccatgaatatgtaaatgcggctggaataacatagtaa

SEQ ID NO: 267 - DNA, 3636 bp, Artificial Sequence
  chemically synthesized
atggactacaaagaccatgacggtgattataaagatcatgacatcgattacaaggatgacgatgacaagggcggaatgggttgttgtttcagcaagacagcggcgaaaggtgaagcagcagcagaaagaccaggcgaggctgcggtagcatcaagtccctccaaggctaatgggcaggaaaacggacacgtcaaagttggaagcggaggcaacatccccgctctggtggaaaaccagaagaagtactttggcacctacagcgtgatggccatgctgaacgctcagaccgtgctggaccacatccagaaggtggccgatattgagggcgagcagaacgagaacaacgagaatctgtggtttcaccccgtgatgagccacctgtacaacgccaagaacggctacgacaagcagcccgagaaaaccatgttcatcatcgagcggctgcagagctacttcccattcctgaagatcatggccgagaaccagagagagtacagcaacggcaagtacaagcagaaccgcgtggaagtgaacagcaacgacatcttcgaggtgctgaagcgcgccttcggcgtgctgaagatgtacagggacctgaccaacgcatacaagacctacgaggaaaagctgaacgacggctgcgagttcctgaccagcacagagcaacctctgagcggcatgatcaacaactactacacagtggccctgcggaacatgaacgagagatacggctacaagacagaggacctggccttcatccaggacaagcggttcaagttcgtgaaggacgcctacggcaagaaaaagtcccaagtgaataccggattcttcctgagcctgcaggactacaacggcgacacacagaagaagctgcacctgagcggagtgggaatcgccctgctgatctgcctgttcctggacaagcagtacatcaacatctttctgagcaggctgcccatcttctccagctacaatgcccagagcgaggaacggcggatcatcatcagatccttcggcatcaacagcatcaagctgcccaaggaccggatccacagcgagaagtccaacaagagcgtggccatggatatgctcaacgaagtgaagcggtgccccgacgagctgttcacaacactgtctgccgagaagcagtcccggttcagaatcatcagcgacgaccacaatgaagtgctgatgaagcggagcagcgacagattcgtgcctctgctgctgcagtatatcgattacggcaagctgttcgaccacatcaggttccacgtgaacatgggcaagctgagatacctgctgaaggccgacaagacctgcatcgacggccagaccagagtcagagtgatcgagcagcccctgaacggcttcggcagactggaagaggccgagacaatgcggaagcaagagaacggcaccttcggcaacagcggcatccggatcagagacttcgagaacatgaagcgggacgacgccaatcctgccaactatccctacatcgtggacacctacacacactacatcctggaaaacaacaaggtcgagatgtttatcaacgacaaagaggacagcgccccactgctgcccgtgatcgaggatgatagatacgtggtcaagacaatccccagctgccggatgagcaccctggaaattccagccatggccttccacatgtttctgttcggcagcaagaaaaccgagaagctgatcgtggacgtgcacaaccggtacaagagactgttccaggccatgcagaaagaagaagtgaccgccgagaatatcgccagcttcggaatcgccgagagcgacctgcctcagaagatcctggatctgatcagcggcaatgcccacggcaaggatgtggacgccttcatcagactgaccgtggacgacatgctgaccgacaccgagcggagaatcaagagattcaaggacgaccggaagtccattcggagcgccgacaacaagatgggaaagagaggcttcaagcagatctccacaggcaagctggccgacttcctggccaaggacatcgtgctgtttcagcccagcgtgaacgatggcgagaacaagatcaccggcctgaactaccggatcatgcagagcgccattgccgtgtacgatagcggcgacgattacgaggccaagcagcagttcaagctgatgttcgagaaggcccggctgatcggcaagggcacaacagagcctcatccatttctgtacaaggtgttcgcccgcagcatccccgccaatgccgtcgagttctacgagcgctacctgatcgagcggaagttctacctgaccggcctgtccaacgagatcaagaaaggcaacagagtggatgtgcccttcatccggcgggaccagaacaagtggaaaacacccgccatgaagaccctgggcagaatctacagcgaggatctgcccgtggaactgcccagacagatgttcgacaatgagatcaagtcccacctgaagtccctgccacagatggaaggcatcgacttcaacaatgccaacgtgacctatctgatcgccgagtacatgaagagagtgctggacgacgacttccagaccttctaccagtggaaccgcaactaccggtacatggacatgcttaagggcgagtacgacagaaagggctccctgcagcactgcttcaccagcgtggaagagagagaaggcctctggaaagagcgggcctccagaacagagcggtacagaaagcaggccagcaacaagatccgcagcaaccggcagatgagaaacgccagcagcgaagagatcgagacaatcctggataagcggctgagcaacagccggaacgagtaccagaaaagcgagaaagtgatccggcgctacagagtgcaggatgccctgctgtttctgctggccaaaaagaccctgaccgaactggccgatttcgacggcgagaggttcaaactgaaagaaatcatgcccgacgccgagaagggaatcctgagcgagatcatgcccatgagcttcaccttcgagaaaggcggcaagaagtacaccatcaccagcgagggcatgaagctgaagaactacggcgacttctttgtgctggctagcgacaagaggatcggcaacctgctggaactcgtgggcagcgacatcgtgtccaaagaggattcgcgaggcggtggaggtagtggagggggaggatcaacgcgtggaggtagagatcacatggtactgcacgaatatgtaaatgctgcaggcatcactggtggctcaggagggcgcgaccacatggttttgcacgagtatgtgaacgccgccggaataacggggggttcaggaggccgggatcatatggttctccatgaatatgtcaacgcggctggtattacgggcggatcaggcgggcgggatcacatggttcttcacgaatacgtcaacgcggctggaattacaggtggttccggaggaagagatcacatggtactccacgaatatgttaatgctgcaggtataactggcggctctgggggtcgggatcatatggtgttgcatgaatacgtcaacgcagccgggataaccggaggttctggtggtcgagatcacatggtactccatgaatatgtaaatgcggctggaataacatagtaa

SEQ ID NO: 268 - DNA, 3558 bp, Artificial Sequence
  chemically synthesized
atggactacaaagaccatgacggtgattataaagatcatgacatcgattacaaggatgacgatgacaagggcggaatgctgctgcccgtccccctgctgctgggcctgctgggcgccgccgccgacggaggcaacatccccgctctggtggaaaaccagaagaagtactttggcacctacagcgtgatggccatgctgaacgctcagaccgtgctggaccacatccagaaggtggccgatattgagggcgagcagaacgagaacaacgagaatctgtggtttcaccccgtgatgagccacctgtacaacgccaagaacggctacgacaagcagcccgagaaaaccatgttcatcatcgagcggctgcagagctacttcccattcctgaagatcatggccgagaaccagagagagtacagcaacggcaagtacaagcagaaccgcgtggaagtgaacagcaacgacatcttcgaggtgctgaagcgcgccttcggcgtgctgaagatgtacagggacctgaccaacgcatacaagacctacgaggaaaagctgaacgacggctgcgagttcctgaccagcacagagcaacctctgagcggcatgatcaacaactactacacagtggccctgcggaacatgaacgagagatacggctacaagacagaggacctggccttcatccaggacaagcggttcaagttcgtgaaggacgcctacggcaagaaaaagtcccaagtgaataccggattcttcctgagcctgcaggactacaacggcgacacacagaagaagctgcacctgagcggagtgggaatcgccctgctgatctgcctgttcctggacaagcagtacatcaacatctttctgagcaggctgcccatcttctccagctacaatgcccagagcgaggaacggcggatcatcatcagatccttcggcatcaacagcatcaagctgcccaaggaccggatccacagcgagaagtccaacaagagcgtggccatggatatgctcaacgaagtgaagcggtgccccgacgagctgttcacaacactgtctgccgagaagcagtcccggttcagaatcatcagcgacgaccacaatgaagtgctgatgaagcggagcagcgacagattcgtgcctctgctgctgcagtatatcgattacggcaagctgttcgaccacatcaggttccacgtgaacatgggcaagctgagatacctgctgaaggccgacaagacctgcatcgacggccagaccagagtcagagtgatcgagcagcccctgaacggcttcggcagactggaagaggccgagacaatgcggaagcaagagaacggcaccttcggcaacagcggcatccggatcagagacttcgagaacatgaagcgggacgacgccaatcctgccaactatccctacatcgtggacacctacacacactacatcctggaaaacaacaaggtcgagatgtttatcaacgacaaagaggacagcgccccactgctgcccgtgatcgaggatgatagatacgtggtcaagacaatccccagctgccggatgagcaccctggaaattccagccatggccttccacatgtttctgttcggcagcaagaaaaccgagaagctgatcgtggacgtgcacaaccggtacaagagactgttccaggccatgcagaaagaagaagtgaccgccgagaatatcgccagcttcggaatcgccgagagcgacctgcctcagaagatcctggatctgatcagcggcaatgcccacggcaaggatgtggacgccttcatcagactgaccgtggacgacatgctgaccgacaccgagcggagaatcaagagattcaaggacgaccggaagtccattcggagcgccgacaacaagatgggaaagagaggcttcaagcagatctccacaggcaagctggccgacttcctggccaaggacatcgtgctgtttcagcccagcgtgaacgatggcgagaacaagatcaccggcctgaactaccggatcatgcagagcgccattgccgtgtacgatagcggcgacgattacgaggccaagcagcagttcaagctgatgttcgagaaggcccggctgatcggcaagggcacaacagagcctcatccatttctgtacaaggtgttcgcccgcagcatccccgccaatgccgtcgagttctacgagcgctacctgatcgagcggaagttctacctgaccggcctgtccaacgagatcaagaaaggcaacagagtggatgtgcccttcatccggcgggaccagaacaagtggaaaacacccgccatgaagaccctgggcagaatctacagcgaggatctgcccgtggaactgcccagacagatgttcgacaatgagatcaagtcccacctgaagtccctgccacagatggaaggcatcgacttcaacaatgccaacgtgacctatctgatcgccgagtacatgaagagagtgctggacgacgacttccagaccttctaccagtggaaccgcaactaccggtacatggacatgcttaagggcgagtacgacagaaagggctccctgcagcactgcttcaccagcgtggaagagagagaaggcctctggaaagagcgggcctccagaacagagcggtacagaaagcaggccagcaacaagatccgcagcaaccggcagatgagaaacgccagcagcgaagagatcgagacaatcctggataagcggctgagcaacagccggaacgagtaccagaaaagcgagaaagtgatccggcgctacagagtgcaggatgccctgctgtttctgctggccaaaaagaccctgaccgaactggccgatttcgacggcgagaggttcaaactgaaagaaatcatgcccgacgccgagaagggaatcctgagcgagatcatgcccatgagcttcaccttcgagaaaggcggcaagaagtacaccatcaccagcgagggcatgaagctgaagaactacggcgacttctttgtgctggctagcgacaagaggatcggcaacctgctggaactcgtgggcagcgacatcgtgtccaaagaggattcgcgaggcggtggaggtagtggagggggaggatcaacgcgtggaggtagagatcacatggtactgcacgaatatgtaaatgctgcaggcatcactggtggctcaggagggcgcgaccacatggttttgcacgagtatgtgaacgccgccggaataacggggggttcaggaggccgggatcatatggttctccatgaatatgtcaacgcggctggtattacgggcggatcaggcgggcgggatcacatggttcttcacgaatacgtcaacgcggctggaattacaggtggttccggaggaagagatcacatggtactccacgaatatgttaatgctgcaggtataactggcggctctgggggtcgggatcatatggtgttgcatgaatacgtcaacgcagccgggataaccggaggttctggtggtcgagatcacatggtactccatgaatatgtaaatgcggctggaataacatagtaa

SEQ ID NO: 269 - DNA, 3537 bp, Artificial Sequence
  chemically synthesized
atggactacaaagaccatgacggtgattataaagatcatgacatcgattacaaggatgacgatgacaagggcggagggatcactctcggcaaggacgagctgtaaggaggcaacatccccgctctggtggaaaaccagaagaagtactttggcacctacagcgtgatggccatgctgaacgctcagaccgtgctggaccacatccagaaggtggccgatattgagggcgagcagaacgagaacaacgagaatctgtggtttcaccccgtgatgagccacctgtacaacgccaagaacggctacgacaagcagcccgagaaaaccatgttcatcatcgagcggctgcagagctacttcccattcctgaagatcatggccgagaaccagagagagtacagcaacggcaagtacaagcagaaccgcgtggaagtgaacagcaacgacatcttcgaggtgctgaagcgcgccttcggcgtgctgaagatgtacagggacctgaccaacgcatacaagacctacgaggaaaagctgaacgacggctgcgagttcctgaccagcacagagcaacctctgagcggcatgatcaacaactactacacagtggccctgcggaacatgaacgagagatacggctacaagacagaggacctggccttcatccaggacaagcggttcaagttcgtgaaggacgcctacggcaagaaaaagtcccaagtgaataccggattcttcctgagcctgcaggactacaacggcgacacacagaagaagctgcacctgagcggagtgggaatcgccctgctgatctgcctgttcctggacaagcagtacatcaacatctttctgagcaggctgcccatcttctccagctacaatgcccagagcgaggaacggcggatcatcatcagatccttcggcatcaacagcatcaagctgcccaaggaccggatccacagcgagaagtccaacaagagcgtggccatggatatgctcaacgaagtgaagcggtgccccgacgagctgttcacaacactgtctgccgagaagcagtcccggttcagaatcatcagcgacgaccacaatgaagtgctgatgaagcggagcagcgacagattcgtgcctctgctgctgcagtatatcgattacggcaagctgttcgaccacatcaggttccacgtgaacatgggcaagctgagatacctgctgaaggccgacaagacctgcatcgacggccagaccagagtcagagtgatcgagcagcccctgaacggcttcggcagactggaagaggccgagacaatgcggaagcaagagaacggcaccttcggcaacagcggcatccggatcagagacttcgagaacatgaagcgggacgacgccaatcctgccaactatccctacatcgtggacacctacacacactacatcctggaaaacaacaaggtcgagatgtttatcaacgacaaagaggacagcgccccactgctgcccgtgatcgaggatgatagatacgtggtcaagacaatccccagctgccggatgagcaccctggaaattccagccatggccttccacatgtttctgttcggcagcaagaaaaccgagaagctgatcgtggacgtgcacaaccggtacaagagactgttccaggccatgcagaaagaagaagtgaccgccgagaatatcgccagcttcggaatcgccgagagcgacctgcctcagaagatcctggatctgatcagcggcaatgcccacggcaaggatgtggacgccttcatcagactgaccgtggacgacatgctgaccgacaccgagcggagaatcaagagattcaaggacgaccggaagtccattcggagcgccgacaacaagatgggaaagagaggcttcaagcagatctccacaggcaagctggccgacttcctggccaaggacatcgtgctgtttcagcccagcgtgaacgatggcgagaacaagatcaccggcctgaactaccggatcatgcagagcgccattgccgtgtacgatagcggcgacgattacgaggccaagcagcagttcaagctgatgttcgagaaggcccggctgatcggcaagggcacaacagagcctcatccatttctgtacaaggtgttcgcccgcagcatccccgccaatgccgtcgagttctacgagcgctacctgatcgagcggaagttctacctgaccggcctgtccaacgagatcaagaaaggcaacagagtggatgtgcccttcatccggcgggaccagaacaagtggaaaacacccgccatgaagaccctgggcagaatctacagcgaggatctgcccgtggaactgcccagacagatgttcgacaatgagatcaagtcccacctgaagtccctgccacagatggaaggcatcgacttcaacaatgccaacgtgacctatctgatcgccgagtacatgaagagagtgctggacgacgacttccagaccttctaccagtggaaccgcaactaccggtacatggacatgcttaagggcgagtacgacagaaagggctccctgcagcactgcttcaccagcgtggaagagagagaaggcctctggaaagagcgggcctccagaacagagcggtacagaaagcaggccagcaacaagatccgcagcaaccggcagatgagaaacgccagcagcgaagagatcgagacaatcctggataagcggctgagcaacagccggaacgagtaccagaaaagcgagaaagtgatccggcgctacagagtgcaggatgccctgctgtttctgctggccaaaaagaccctgaccgaactggccgatttcgacggcgagaggttcaaactgaaagaaatcatgcccgacgccgagaagggaatcctgagcgagatcatgcccatgagcttcaccttcgagaaaggcggcaagaagtacaccatcaccagcgagggcatgaagctgaagaactacggcgacttctttgtgctggctagcgacaagaggatcggcaacctgctggaactcgtgggcagcgacatcgtgtccaaagaggattcgcgaggcggtggaggtagtggagggggaggatcaacgcgtggaggtagagatcacatggtactgcacgaatatgtaaatgctgcaggcatcactggtggctcaggagggcgcgaccacatggttttgcacgagtatgtgaacgccgccggaataacggggggttcaggaggccgggatcatatggttctccatgaatatgtcaacgcggctggtattacgggcggatcaggcgggcgggatcacatggttcttcacgaatacgtcaacgcggctggaattacaggtggttccggaggaagagatcacatggtactccacgaatatgttaatgctgcaggtataactggcggctctgggggtcgggatcatatggtgttgcatgaatacgtcaacgcagccgggataaccggaggttctggtggtcgagatcacatggtactccatgaatatgtaaatgcggctggaataacatagtaa

SEQ ID NO: 270 - DNA, 3519 bp, Artificial Sequence
  chemically synthesized
atggactacaaagaccatgacggtgattataaagatcatgacatcgattacaaggatgacgatgacaagggcggatccaaattataaggaggcaacatccccgctctggtggaaaaccagaagaagtactttggcacctacagcgtgatggccatgctgaacgctcagaccgtgctggaccacatccagaaggtggccgatattgagggcgagcagaacgagaacaacgagaatctgtggtttcaccccgtgatgagccacctgtacaacgccaagaacggctacgacaagcagcccgagaaaaccatgttcatcatcgagcggctgcagagctacttcccattcctgaagatcatggccgagaaccagagagagtacagcaacggcaagtacaagcagaaccgcgtggaagtgaacagcaacgacatcttcgaggtgctgaagcgcgccttcggcgtgctgaagatgtacagggacctgaccaacgcatacaagacctacgaggaaaagctgaacgacggctgcgagttcctgaccagcacagagcaacctctgagcggcatgatcaacaactactacacagtggccctgcggaacatgaacgagagatacggctacaagacagaggacctggccttcatccaggacaagcggttcaagttcgtgaaggacgcctacggcaagaaaaagtcccaagtgaataccggattcttcctgagcctgcaggactacaacggcgacacacagaagaagctgcacctgagcggagtgggaatcgccctgctgatctgcctgttcctggacaagcagtacatcaacatctttctgagcaggctgcccatcttctccagctacaatgcccagagcgaggaacggcggatcatcatcagatccttcggcatcaacagcatcaagctgcccaaggaccggatccacagcgagaagtccaacaagagcgtggccatggatatgctcaacgaagtgaagcggtgccccgacgagctgttcacaacactgtctgccgagaagcagtcccggttcagaatcatcagcgacgaccacaatgaagtgctgatgaagcggagcagcgacagattcgtgcctctgctgctgcagtatatcgattacggcaagctgttcgaccacatcaggttccacgtgaacatgggcaagctgagatacctgctgaaggccgacaagacctgcatcgacggccagaccagagtcagagtgatcgagcagcccctgaacggcttcggcagactggaagaggccgagacaatgcggaagcaagagaacggcaccttcggcaacagcggcatccggatcagagacttcgagaacatgaagcgggacgacgccaatcctgccaactatccctacatcgtggacacctacacacactacatcctggaaaacaacaaggtcgagatgtttatcaacgacaaagaggacagcgccccactgctgcccgtgatcgaggatgatagatacgtggtcaagacaatccccagctgccggatgagcaccctggaaattccagccatggccttccacatgtttctgttcggcagcaagaaaaccgagaagctgatcgtggacgtgcacaaccggtacaagagactgttccaggccatgcagaaagaagaagtgaccgccgagaatatcgccagcttcggaatcgccgagagcgacctgcctcagaagatcctggatctgatcagcggcaatgcccacggcaaggatgtggacgccttcatcagactgaccgtggacgacatgctgaccgacaccgagcggagaatcaagagattcaaggacgaccggaagtccattcggagcgccgacaacaagatgggaaagagaggcttcaagcagatctccacaggcaagctggccgacttcctggccaaggacatcgtgctgtttcagcccagcgtgaacgatggcgagaacaagatcaccggcctgaactaccggatcatgcagagcgccattgccgtgtacgatagcggcgacgattacgaggccaagcagcagttcaagctgatgttcgagaaggcccggctgatcggcaagggcacaacagagcctcatccatttctgtacaaggtgttcgcccgcagcatccccgccaatgccgtcgagttctacgagcgctacctgatcgagcggaagttctacctgaccggcctgtccaacgagatcaagaaaggcaacagagtggatgtgcccttcatccggcgggaccagaacaagtggaaaacacccgccatgaagaccctgggcagaatctacagcgaggatctgcccgtggaactgcccagacagatgttcgacaatgagatcaagtcccacctgaagtccctgccacagatggaaggcatcgacttcaacaatgccaacgtgacctatctgatcgccgagtacatgaagagagtgctggacgacgacttccagaccttctaccagtggaaccgcaactaccggtacatggacatgcttaagggcgagtacgacagaaagggctccctgcagcactgcttcaccagcgtggaagagagagaaggcctctggaaagagcgggcctccagaacagagcggtacagaaagcaggccagcaacaagatccgcagcaaccggcagatgagaaacgccagcagcgaagagatcgagacaatcctggataagcggctgagcaacagccggaacgagtaccagaaaagcgagaaagtgatccggcgctacagagtgcaggatgccctgctgtttctgctggccaaaaagaccctgaccgaactggccgatttcgacggcgagaggttcaaactgaaagaaatcatgcccgacgccgagaagggaatcctgagcgagatcatgcccatgagcttcaccttcgagaaaggcggcaagaagtacaccatcaccagcgagggcatgaagctgaagaactacggcgacttctttgtgctggctagcgacaagaggatcggcaacctgctggaactcgtgggcagcgacatcgtgtccaaagaggattcgcgaggcggtggaggtagtggagggggaggatcaacgcgtggaggtagagatcacatggtactgcacgaatatgtaaatgctgcaggcatcactggtggctcaggagggcgcgaccacatggttttgcacgagtatgtgaacgccgccggaataacggggggttcaggaggccgggatcatatggttctccatgaatatgtcaacgcggctggtattacgggcggatcaggcgggcgggatcacatggttcttcacgaatacgtcaacgcggctggaattacaggtggttccggaggaagagatcacatggtactccacgaatatgttaatgctgcaggtataactggcggctctgggggtcgggatcatatggtgttgcatgaatacgtcaacgcagccgggataaccggaggttctggtggtcgagatcacatggtactccatgaatatgtaaatgcggctggaataacatagtaa

SEQ ID NO: 271 - DNA, 3471 bp, Artificial Sequence
  chemically synthesized
atggactacaaagaccatgacggtgattataaagatcatgacatcgattacaaggatgacgatgacaagggcggaaactcaaagaaaaggtcactggaggacaacgaaacggaaatcaaagtctccagagacacctggaacactaagaacatgcggtccctggaaccgccacgaagcaagaaacggatacatggaggcaacatccccgctctggtggaaaaccagaagaagtactttggcacctacagcgtgatggccatgctgaacgctcagaccgtgctggaccacatccagaaggtggccgatattgagggcgagcagaacgagaacaacgagaatctgtggtttcaccccgtgatgagccacctgtacaacgccaagaacggctacgacaagcagcccgagaaaaccatgttcatcatcgagcggctgcagagctacttcccattcctgaagatcatggccgagaaccagagagagtacagcaacggcaagtacaagcagaaccgcgtggaagtgaacagcaacgacatcttcgaggtgctgaagcgcgccttcggcgtgctgaagatgtacagggacctgaccaaccactacaagacctacgaggaaaagctgaacgacggctgcgagttcctgaccagcacagagcaacctctgagcggcatgatcaacaactactacacagtggccctgcggaacatgaacgagagatacggctacaagacagaggacctggccttcatccaggacaagcggttcaagttcgtgaaggacgcctacggcaagaaaaagtcccaagtgaataccggattcttcctgagcctgcaggactacaacggcgacacacagaagaagctgcacctgagcggagtgggaatcgccctgctgatctgcctgttcctggacaagcagtacatcaacatctttctgagcaggctgcccatcttctccagctacaatgcccagagcgaggaacggcggatcatcatcagatccttcggcatcaacagcatcaagctgcccaaggaccggatccacagcgagaagtccaacaagagcgtggccatggatatgctcaacgaagtgaagcggtgccccgacgagctgttcacaacactgtctgccgagaagcagtcccggttcagaatcatcagcgacgaccacaatgaagtgctgatgaagcggagcagcgacagattcgtgcctctgctgctgcagtatatcgattacggcaagctgttcgaccacatcaggttccacgtgaacatgggcaagctgagatacctgctgaaggccgacaagacctgcatcgacggccagaccagagtcagagtgatcgagcagcccctgaacggcttcggcagactggaagaggccgagacaatgcggaagcaagagaacggcaccttcggcaacagcggcatccggatcagagacttcgagaacatgaagcgggacgacgccaatcctgccaactatccctacatcgtggacacctacacacactacatcctggaaaacaacaaggtcgagatgtttatcaacgacaaagaggacagcgccccactgctgcccgtgatcgaggatgatagatacgtggtcaagacaatccccagctgccggatgagcaccctggaaattccagccatggccttccacatgtttctgttcggcagcaagaaaaccgagaagctgatcgtggacgtgcacaaccggtacaagagactgttccaggccatgcagaaagaagaagtgaccgccgagaatatcgccagcttcggaatcgccgagagcgacctgcctcagaagatcctggatctgatcagcggcaatgcccacggcaaggatgtggacgccttcatcagactgaccgtggacgacatgctgaccgacaccgagcggagaatcaagagattcaaggacgaccggaagtccattcggagcgccgacaacaagatgggaaagagaggcttcaagcagatctccacaggcaagctggccgacttcctggccaaggacatcgtgctgtttcagcccagcgtgaacgatggcgagaacaagatcaccggcctgaactaccggatcatgcagagcgccattgccgtgtacgatagcggcgacgattacgaggccaagcagcagttcaagctgatgttcgagaaggcccggctgatcggcaagggcacaacagagcctcatccatttctgtacaaggtgttcgcccgcagcatccccgccaatgccgtcgagttctacgagcgctacctgatcgagcggaagttctacctgaccggcctgtccaacgagatcaagaaaggcaacagagtggatgtgcccttcatccggcgggaccagaacaagtggaaaacacccgccatgaagaccctgggcagaatctacagcgaggatctgcccgtggaactgcccagacagatgttcgacaatgagatcaagtcccacctgaagtccctgccacagatggaaggcatcgacttcaacaatgccaacgtgacctatctgatcgccgagtacatgaagagagtgctggacgacgacttccagaccttctaccagtggaaccgcaactaccggtacatggacatgcttaagggcgagtacgacagaaagggctccctgcagcactgcttcaccagcgtggaagagagagaaggcctctggaaagagcgggcctccagaacagagcggtacagaaagcaggccagcaacaagatccgcagcaaccggcagatgagaaacgccagcagcgaagagatcgagacaatcctggataagcggctgagcaacagccggaacgagtaccagaaaagcgagaaagtgatccggcgctacagagtgcaggatgccctgctgtttctgctggccaaaaagaccctgaccgaactggccgatttcgacggcgagaggttcaaactgaaagaaatcatgcccgacgccgagaagggaatcctgagcgagatcatgcccatgagcttcaccttcgagaaaggcggcaagaagtacaccatcaccagcgagggcatgaagctgaagaactacggcgacttctttgtgctggctagcgacaagaggatcggcaacctgctggaactcgtgggcagcgacatcgtgtccaaagaggatatcatggaagagttcaacaaatacgaccagtgcaggcccgagatcagctccatcgtgttcaacctggaaaagtgggccttcgacacataccccgagctgtctgccagagtggaccgggaagagaaggtggacttcaagagcatcctgaaaatcctgctgaacaacaagaacatcaacaaagagcagagcgacatcctgcggaagatccggaacgccttcgatcacaacaattaccccgacaaaggcgtggtggaaatcaaggccctgcctgagatcgccatgagcatcaagaaggcctttggggagtacgccatcatgaagtagtaa

SEQ ID NO: 272 - DNA, 3387 bp, Artificial Sequence
  chemically synthesized
atggactacaaagaccatgacggtgattataaagatcatgacatcgattacaaggatgacgatgacaagggcggacttcaactgcctccacttgaaagactgacactgggaggcaacatccccgctctggtggaaaaccagaagaagtactttggcacctacagcgtgatggccatgctgaacgctcagaccgtgctggaccacatccagaaggtggccgatattgagggcgagcagaacgagaacaacgagaatctgtggtttcaccccgtgatgagccacctgtacaacgccaagaacggctacgacaagcagcccgagaaaaccatgttcatcatcgagcggctgcagagctacttcccattcctgaagatcatggccgagaaccagagagagtacagcaacggcaagtacaagcagaaccgcgtggaagtgaacagcaacgacatcttcgaggtgctgaagcgcgccttcggcgtgctgaagatgtacagggacctgaccaaccactacaagacctacgaggaaaagctgaacgacggctgcgagttcctgaccagcacagagcaacctctgagcggcatgatcaacaactactacacagtggccctgcggaacatgaacgagagatacggctacaagacagaggacctggccttcatccaggacaagcggttcaagttcgtgaaggacgcctacggcaagaaaaagtcccaagtgaataccggattcttcctgagcctgcaggactacaacggcgacacacagaagaagctgcacctgagcggagtgggaatcgccctgctgatctgcctgttcctggacaagcagtacatcaacatctttctgagcaggctgcccatcttctccagctacaatgcccagagcgaggaacggcggatcatcatcagatccttcggcatcaacagcatcaagctgcccaaggaccggatccacagcgagaagtccaacaagagcgtggccatggatatgctcaacgaagtgaagcggtgccccgacgagctgttcacaacactgtctgccgagaagcagtcccggttcagaatcatcagcgacgaccacaatgaagtgctgatgaagcggagcagcgacagattcgtgcctctgctgctgcagtatatcgattacggcaagctgttcgaccacatcaggttccacgtgaacatgggcaagctgagatacctgctgaaggccgacaagacctgcatcgacggccagaccagagtcagagtgatcgagcagcccctgaacggcttcggcagactggaagaggccgagacaatgcggaagcaagagaacggcaccttcggcaacagcggcatccggatcagagacttcgagaacatgaagcgggacgacgccaatcctgccaactatccctacatcgtggacacctacacacactacatcctggaaaacaacaaggtcgagatgtttatcaacgacaaagaggacagcgccccactgctgcccgtgatcgaggatgatagatacgtggtcaagacaatccccagctgccggatgagcaccctggaaattccagccatggccttccacatgtttctgttcggcagcaagaaaaccgagaagctgatcgtggacgtgcacaaccggtacaagagactgttccaggccatgcagaaagaagaagtgaccgccgagaatatcgccagcttcggaatcgccgagagcgacctgcctcagaagatcctggatctgatcagcggcaatgcccacggcaaggatgtggacgccttcatcagactgaccgtggacgacatgctgaccgacaccgagcggagaatcaagagattcaaggacgaccggaagtccattcggagcgccgacaacaagatgggaaagagaggcttcaagcagatctccacaggcaagctggccgacttcctggccaaggacatcgtgctgtttcagcccagcgtgaacgatggcgagaacaagatcaccggcctgaactaccggatcatgcagagcgccattgccgtgtacgatagcggcgacgattacgaggccaagcagcagttcaagctgatgttcgagaaggcccggctgatcggcaagggcacaacagagcctcatccatttctgtacaaggtgttcgcccgcagcatccccgccaatgccgtcgagttctacgagcgctacctgatcgagcggaagttctacctgaccggcctgtccaacgagatcaagaaaggcaacagagtggatgtgcccttcatccggcgggaccagaacaagtggaaaacacccgccatgaagaccctgggcagaatctacagcgaggatctgcccgtggaactgcccagacagatgttcgacaatgagatcaagtcccacctgaagtccctgccacagatggaaggcatcgacttcaacaatgccaacgtgacctatctgatcgccgagtacatgaagagagtgctggacgacgacttccagaccttctaccagtggaaccgcaactaccggtacatggacatgcttaagggcgagtacgacagaaagggctccctgcagcactgcttcaccagcgtggaagagagagaaggcctctggaaagagcgggcctccagaacagagcggtacagaaagcaggccagcaacaagatccgcagcaaccggcagatgagaaacgccagcagcgaagagatcgagacaatcctggataagcggctgagcaacagccggaacgagtaccagaaaagcgagaaagtgatccggcgctacagagtgcaggatgccctgctgtttctgctggccaaaaagaccctgaccgaactggccgatttcgacggcgagaggttcaaactgaaagaaatcatgcccgacgccgagaagggaatcctgagcgagatcatgcccatgagcttcaccttcgagaaaggcggcaagaagtacaccatcaccagcgagggcatgaagctgaagaactacggcgacttctttgtgctggctagcgacaagaggatcggcaacctgctggaactcgtgggcagcgacatcgtgtccaaagaggatatcatggaagagttcaacaaatacgaccagtgcaggcccgagatcagctccatcgtgttcaacctggaaaagtgggccttcgacacataccccgagctgtctgccagagtggaccgggaagagaaggtggacttcaagagcatcctgaaaatcctgctgaacaacaagaacatcaacaaagagcagagcgacatcctgcggaagatccggaacgccttcgatcacaacaattaccccgacaaaggcgtggtggaaatcaaggccctgcctgagatcgccatgagcatcaagaaggcctttggggagtacgccatcatgaagtagtaa

SEQ ID NO: 273 - DNA, 3402 bp, Artificial Sequence
  chemically synthesized
atggactacaaagaccatgacggtgattataaagatcatgacatcgattacaaggatgacgatgacaagggcggaggatcccttcaactgcctccacttgaaagactgacactgggtagttccggaggcaacatccccgctctggtggaaaaccagaagaagtactttggcacctacagcgtgatggccatgctgaacgctcagaccgtgctggaccacatccagaaggtggccgatattgagggcgagcagaacgagaacaacgagaatctgtggtttcaccccgtgatgagccacctgtacaacgccaagaacggctacgacaagcagcccgagaaaaccatgttcatcatcgagcggctgcagagctacttcccattcctgaagatcatggccgagaaccagagagagtacagcaacggcaagtacaagcagaaccgcgtggaagtgaacagcaacgacatcttcgaggtgctgaagcgcgccttcggcgtgctgaagatgtacagggacctgaccaaccactacaagacctacgaggaaaagctgaacgacggctgcgagttcctgaccagcacagagcaacctctgagcggcatgatcaacaactactacacagtggccctgcggaacatgaacgagagatacggctacaagacagaggacctggccttcatccaggacaagcggttcaagttcgtgaaggacgcctacggcaagaaaaagtcccaagtgaataccggattcttcctgagcctgcaggactacaacggcgacacacagaagaagctgcacctgagcggagtgggaatcgccctgctgatctgcctgttcctggacaagcagtacatcaacatctttctgagcaggctgcccatcttctccagctacaatgcccagagcgaggaacggcggatcatcatcagatccttcggcatcaacagcatcaagctgcccaaggaccggatccacagcgagaagtccaacaagagcgtggccatggatatgctcaacgaagtgaagcggtgccccgacgagctgttcacaacactgtctgccgagaagcagtcccggttcagaatcatcagcgacgaccacaatgaagtgctgatgaagcggagcagcgacagattcgtgcctctgctgctgcagtatatcgattacggcaagctgttcgaccacatcaggttccacgtgaacatgggcaagctgagatacctgctgaaggccgacaagacctgcatcgacggccagaccagagtcagagtgatcgagcagcccctgaacggcttcggcagactggaagaggccgagacaatgcggaagcaagagaacggcaccttcggcaacagcggcatccggatcagagacttcgagaacatgaagcgggacgacgccaatcctgccaactatccctacatcgtggacacctacacacactacatcctggaaaacaacaaggtcgagatgtttatcaacgacaaagaggacagcgccccactgctgcccgtgatcgaggatgatagatacgtggtcaagacaatccccagctgccggatgagcaccctggaaattccagccatggccttccacatgtttctgttcggcagcaagaaaaccgagaagctgatcgtggacgtgcacaaccggtacaagagactgttccaggccatgcagaaagaagaagtgaccgccgagaatatcgccagcttcggaatcgccgagagcgacctgcctcagaagatcctggatctgatcagcggcaatgcccacggcaaggatgtggacgccttcatcagactgaccgtggacgacatgctgaccgacaccgagcggagaatcaagagattcaaggacgaccggaagtccattcggagcgccgacaacaagatgggaaagagaggcttcaagcagatctccacaggcaagctggccgacttcctggccaaggacatcgtgctgtttcagcccagcgtgaacgatggcgagaacaagatcaccggcctgaactaccggatcatgcagagcgccattgccgtgtacgatagcggcgacgattacgaggccaagcagcagttcaagctgatgttcgagaaggcccggctgatcggcaagggcacaacagagcctcatccatttctgtacaaggtgttcgcccgcagcatccccgccaatgccgtcgagttctacgagcgctacctgatcgagcggaagttctacctgaccggcctgtccaacgagatcaagaaaggcaacagagtggatgtgcccttcatccggcgggaccagaacaagtggaaaacacccgccatgaagaccctgggcagaatctacagcgaggatctgcccgtggaactgcccagacagatgttcgacaatgagatcaagtcccacctgaagtccctgccacagatggaaggcatcgacttcaacaatgccaacgtgacctatctgatcgccgagtacatgaagagagtgctggacgacgacttccagaccttctaccagtggaaccgcaactaccggtacatggacatgcttaagggcgagtacgacagaaagggctccctgcagcactgcttcaccagcgtggaagagagagaaggcctctggaaagagcgggcctccagaacagagcggtacagaaagcaggccagcaacaagatccgcagcaaccggcagatgagaaacgccagcagcgaagagatcgagacaatcctggataagcggctgagcaacagccggaacgagtaccagaaaagcgagaaagtgatccggcgctacagagtgcaggatgccctgctgtttctgctggccaaaaagaccctgaccgaactggccgatttcgacggcgagaggttcaaactgaaagaaatcatgcccgacgccgagaagggaatcctgagcgagatcatgcccatgagcttcaccttcgagaaaggcggcaagaagtacaccatcaccagcgagggcatgaagctgaagaactacggcgacttctttgtgctggctagcgacaagaggatcggcaacctgctggaactcgtgggcagcgacatcgtgtccaaagaggatatcatggaagagttcaacaaatacgaccagtgcaggcccgagatcagctccatcgtgttcaacctggaaaagtgggccttcgacacataccccgagctgtctgccagagtggaccgggaagagaaggtggacttcaagagcatcctgaaaatcctgctgaacaacaagaacatcaacaaagagcagagcgacatcctgcggaagatccggaacgccttcgatcacaacaattaccccgacaaaggcgtggtggaaatcaaggccctgcctgagatcgccatgagcatcaagaaggcctttggggagtacgccatcatgaagtagtaa

SEQ ID NO: 274 - DNA, 3450 bp, Artificial Sequence
  chemically synthesized
atggactacaaagaccatgacggtgattataaagatcatgacatcgattacaaggatgacgatgacaagggcggaatgagtgtgttgacgccgttgcttctgcgagggcttaccgggtctgctagaagacttccggtccccagggccaagatacatagcctcggagacccgggaggcaacatccccgctctggtggaaaaccagaagaagtactttggcacctacagcgtgatggccatgctgaacgctcagaccgtgctggaccacatccagaaggtggccgatattgagggcgagcagaacgagaacaacgagaatctgtggtttcaccccgtgatgagccacctgtacaacgccaagaacggctacgacaagcagcccgagaaaaccatgttcatcatcgagcggctgcagagctacttcccattcctgaagatcatggccgagaaccagagagagtacagcaacggcaagtacaagcagaaccgcgtggaagtgaacagcaacgacatcttcgaggtgctgaagcgcgccttcggcgtgctgaagatgtacagggacctgaccaaccactacaagacctacgaggaaaagctgaacgacggctgcgagttcctgaccagcacagagcaacctctgagcggcatgatcaacaactactacacagtggccctgcggaacatgaacgagagatacggctacaagacagaggacctggccttcatccaggacaagcggttcaagttcgtgaaggacgcctacggcaagaaaaagtcccaagtgaataccggattcttcctgagcctgcaggactacaacggcgacacacagaagaagctgcacctgagcggagtgggaatcgccctgctgatctgcctgttcctggacaagcagtacatcaacatctttctgagcaggctgcccatcttctccagctacaatgcccagagcgaggaacggcggatcatcatcagatccttcggcatcaacagcatcaagctgcccaaggaccggatccacagcgagaagtccaacaagagcgtggccatggatatgctcaacgaagtgaagcggtgccccgacgagctgttcacaacactgtctgccgagaagcagtcccggttcagaatcatcagcgacgaccacaatgaagtgctgatgaagcggagcagcgacagattcgtgcctctgctgctgcagtatatcgattacggcaagctgttcgaccacatcaggttccacgtgaacatgggcaagctgagatacctgctgaaggccgacaagacctgcatcgacggccagaccagagtcagagtgatcgagcagcccctgaacggcttcggcagactggaagaggccgagacaatgcggaagcaagagaacggcaccttcggcaacagcggcatccggatcagagacttcgagaacatgaagcgggacgacgccaatcctgccaactatccctacatcgtggacacctacacacactacatcctggaaaacaacaaggtcgagatgtttatcaacgacaaagaggacagcgccccactgctgcccgtgatcgaggatgatagatacgtggtcaagacaatccccagctgccggatgagcaccctggaaattccagccatggccttccacatgtttctgttcggcagcaagaaaaccgagaagctgatcgtggacgtgcacaaccggtacaagagactgttccaggccatgcagaaagaagaagtgaccgccgagaatatcgccagcttcggaatcgccgagagcgacctgcctcagaagatcctggatctgatcagcggcaatgcccacggcaaggatgtggacgccttcatcagactgaccgtggacgacatgctgaccgacaccgagcggagaatcaagagattcaaggacgaccggaagtccattcggagcgccgacaacaagatgggaaagagaggcttcaagcagatctccacaggcaagctggccgacttcctggccaaggacatcgtgctgtttcagcccagcgtgaacgatggcgagaacaagatcaccggcctgaactaccggatcatgcagagcgccattgccgtgtacgatagcggcgacgattacgaggccaagcagcagttcaagctgatgttcgagaaggcccggctgatcggcaagggcacaacagagcctcatccatttctgtacaaggtgttcgcccgcagcatccccgccaatgccgtcgagttctacgagcgctacctgatcgagcggaagttctacctgaccggcctgtccaacgagatcaagaaaggcaacagagtggatgtgcccttcatccggcgggaccagaacaagtggaaaacacccgccatgaagaccctgggcagaatctacagcgaggatctgcccgtggaactgcccagacagatgttcgacaatgagatcaagtcccacctgaagtccctgccacagatggaaggcatcgacttcaacaatgccaacgtgacctatctgatcgccgagtacatgaagagagtgctggacgacgacttccagaccttctaccagtggaaccgcaactaccggtacatggacatgcttaagggcgagtacgacagaaagggctccctgcagcactgcttcaccagcgtggaagagagagaaggcctctggaaagagcgggcctccagaacagagcggtacagaaagcaggccagcaacaagatccgcagcaaccggcagatgagaaacgccagcagcgaagagatcgagacaatcctggataagcggctgagcaacagccggaacgagtaccagaaaagcgagaaagtgatccggcgctacagagtgcaggatgccctgctgtttctgctggccaaaaagaccctgaccgaactggccgatttcgacggcgagaggttcaaactgaaagaaatcatgcccgacgccgagaagggaatcctgagcgagatcatgcccatgagcttcaccttcgagaaaggcggcaagaagtacaccatcaccagcgagggcatgaagctgaagaactacggcgacttctttgtgctggctagcgacaagaggatcggcaacctgctggaactcgtgggcagcgacatcgtgtccaaagaggatatcatggaagagttcaacaaatacgaccagtgcaggcccgagatcagctccatcgtgttcaacctggaaaagtgggccttcgacacataccccgagctgtctgccagagtggaccgggaagagaaggtggacttcaagagcatcctgaaaatcctgctgaacaacaagaacatcaacaaagagcagagcgacatcctgcggaagatccggaacgccttcgatcacaacaattaccccgacaaaggcgtggtggaaatcaaggccctgcctgagatcgccatgagcatcaagaaggcctttggggagtacgccatcatgaagtagtaa

SEQ ID NO: 275 - DNA, 3744 bp, Artificial Sequence
  chemically synthesized
atggactacaaagaccatgacggtgattataaagatcatgacatcgattacaaggatgacgatgacaagggcggaatgagtgtgttgacgccgttgcttctgcgagggcttaccgggtctgctagaagacttccggtccccagggccaagatacatagcctcggagacccgatgtctgtgctcactcctctgcttttgcgaggactgactgggtccgccagacgactcccggtgccgagagctaaaatccatagcctgggaaaattggcaactatgtcagtcctgacgccgcttcttctccggggtcttacagggtctgcaagaaggctgcctgtacctcgggcgaaaattcatagcttgggcgacccgatgagtgtattgacgcccctgttgctgagaggattgactgggtcagcgcgccggctccctgtcccccgagctaagattcactcccttggtaagctgggaggcaacatccccgctctggtggaaaaccagaagaagtactttggcacctacagcgtgatggccatgctgaacgctcagaccgtgctggaccacatccagaaggtggccgatattgagggcgagcagaacgagaacaacgagaatctgtggtttcaccccgtgatgagccacctgtacaacgccaagaacggctacgacaagcagcccgagaaaaccatgttcatcatcgagcggctgcagagctacttcccattcctgaagatcatggccgagaaccagagagagtacagcaacggcaagtacaagcagaaccgcgtggaagtgaacagcaacgacatcttcgaggtgctgaagcgcgccttcggcgtgctgaagatgtacagggacctgaccaaccactacaagacctacgaggaaaagctgaacgacggctgcgagttcctgaccagcacagagcaacctctgagcggcatgatcaacaactactacacagtggccctgcggaacatgaacgagagatacggctacaagacagaggacctggccttcatccaggacaagcggttcaagttcgtgaaggacgcctacggcaagaaaaagtcccaagtgaataccggattcttcctgagcctgcaggactacaacggcgacacacagaagaagctgcacctgagcggagtgggaatcgccctgctgatctgcctgttcctggacaagcagtacatcaacatctttctgagcaggctgcccatcttctccagctacaatgcccagagcgaggaacggcggatcatcatcagatccttcggcatcaacagcatcaagctgcccaaggaccggatccacagcgagaagtccaacaagagcgtggccatggatatgctcaacgaagtgaagcggtgccccgacgagctgttcacaacactgtctgccgagaagcagtcccggttcagaatcatcagcgacgaccacaatgaagtgctgatgaagcggagcagcgacagattcgtgcctctgctgctgcagtatatcgattacggcaagctgttcgaccacatcaggttccacgtgaacatgggcaagctgagatacctgctgaaggccgacaagacctgcatcgacggccagaccagagtcagagtgatcgagcagcccctgaacggcttcggcagactggaagaggccgagacaatgcggaagcaagagaacggcaccttcggcaacagcggcatccggatcagagacttcgagaacatgaagcgggacgacgccaatcctgccaactatccctacatcgtggacacctacacacactacatcctggaaaacaacaaggtcgagatgtttatcaacgacaaagaggacagcgccccactgctgcccgtgatcgaggatgatagatacgtggtcaagacaatccccagctgccggatgagcaccctggaaattccagccatggccttccacatgtttctgttcggcagcaagaaaaccgagaagctgatcgtggacgtgcacaaccggtacaagagactgttccaggccatgcagaaagaagaagtgaccgccgagaatatcgccagcttcggaatcgccgagagcgacctgcctcagaagatcctggatctgatcagcggcaatgcccacggcaaggatgtggacgccttcatcagactgaccgtggacgacatgctgaccgacaccgagcggagaatcaagagattcaaggacgaccggaagtccattcggagcgccgacaacaagatgggaaagagaggcttcaagcagatctccacaggcaagctggccgacttcctggccaaggacatcgtgctgtttcagcccagcgtgaacgatggcgagaacaagatcaccggcctgaactaccggatcatgcagagcgccattgccgtgtacgatagcggcgacgattacgaggccaagcagcagttcaagctgatgttcgagaaggcccggctgatcggcaagggcacaacagagcctcatccatttctgtacaaggtgttcgcccgcagcatccccgccaatgccgtcgagttctacgagcgctacctgatcgagcggaagttctacctgaccggcctgtccaacgagatcaagaaaggcaacagagtggatgtgcccttcatccggcgggaccagaacaagtggaaaacacccgccatgaagaccctgggcagaatctacagcgaggatctgcccgtggaactgcccagacagatgttcgacaatgagatcaagtcccacctgaagtccctgccacagatggaaggcatcgacttcaacaatgccaacgtgacctatctgatcgccgagtacatgaagagagtgctggacgacgacttccagaccttctaccagtggaaccgcaactaccggtacatggacatgcttaagggcgagtacgacagaaagggctccctgcagcactgcttcaccagcgtggaagagagagaaggcctctggaaagagcgggcctccagaacagagcggtacagaaagcaggccagcaacaagatccgcagcaaccggcagatgagaaacgccagcagcgaagagatcgagacaatcctggataagcggctgagcaacagccggaacgagtaccagaaaagcgagaaagtgatccggcgctacagagtgcaggatgccctgctgtttctgctggccaaaaagaccctgaccgaactggccgatttcgacggcgagaggttcaaactgaaagaaatcatgcccgacgccgagaagggaatcctgagcgagatcatgcccatgagcttcaccttcgagaaaggcggcaagaagtacaccatcaccagcgagggcatgaagctgaagaactacggcgacttctttgtgctggctagcgacaagaggatcggcaacctgctggaactcgtgggcagcgacatcgtgtccaaagaggatatcatggaagagttcaacaaatacgaccagtgcaggcccgagatcagctccatcgtgttcaacctggaaaagtgggccttcgacacataccccgagctgtctgccagagtggaccgggaagagaaggtggacttcaagagcatcctgaaaatcctgctgaacaacaagaacatcaacaaagagcagagcgacatcctgcggaagatccggaacgccttcgatcacaacaattaccccgacaaaggcgtggtggaaatcaaggccctgcctgagatcgccatgagcatcaagaaggcctttggggagtacgccatcatgaagtagtaa

SEQ ID NO: 276 - DNA, 3414 bp, Artificial Sequence
  chemically synthesized
atggactacaaagaccatgacggtgattataaagatcatgacatcgattacaaggatgacgatgacaagggcggaatgtacaggatgcaactcctgtcttgcattgcactaagtcttgcacttgtcacgaattccggaggcaacatccccgctctggtggaaaaccagaagaagtactttggcacctacagcgtgatggccatgctgaacgctcagaccgtgctggaccacatccagaaggtggccgatattgagggcgagcagaacgagaacaacgagaatctgtggtttcaccccgtgatgagccacctgtacaacgccaagaacggctacgacaagcagcccgagaaaaccatgttcatcatcgagcggctgcagagctacttcccattcctgaagatcatggccgagaaccagagagagtacagcaacggcaagtacaagcagaaccgcgtggaagtgaacagcaacgacatcttcgaggtgctgaagcgcgccttcggcgtgctgaagatgtacagggacctgaccaaccactacaagacctacgaggaaaagctgaacgacggctgcgagttcctgaccagcacagagcaacctctgagcggcatgatcaacaactactacacagtggccctgcggaacatgaacgagagatacggctacaagacagaggacctggccttcatccaggacaagcggttcaagttcgtgaaggacgcctacggcaagaaaaagtcccaagtgaataccggattcttcctgagcctgcaggactacaacggcgacacacagaagaagctgcacctgagcggagtgggaatcgccctgctgatctgcctgttcctggacaagcagtacatcaacatctttctgagcaggctgcccatcttctccagctacaatgcccagagcgaggaacggcggatcatcatcagatccttcggcatcaacagcatcaagctgcccaaggaccggatccacagcgagaagtccaacaagagcgtggccatggatatgctcaacgaagtgaagcggtgccccgacgagctgttcacaacactgtctgccgagaagcagtcccggttcagaatcatcagcgacgaccacaatgaagtgctgatgaagcggagcagcgacagattcgtgcctctgctgctgcagtatatcgattacggcaagctgttcgaccacatcaggttccacgtgaacatgggcaagctgagatacctgctgaaggccgacaagacctgcatcgacggccagaccagagtcagagtgatcgagcagcccctgaacggcttcggcagactggaagaggccgagacaatgcggaagcaagagaacggcaccttcggcaacagcggcatccggatcagagacttcgagaacatgaagcgggacgacgccaatcctgccaactatccctacatcgtggacacctacacacactacatcctggaaaacaacaaggtcgagatgtttatcaacgacaaagaggacagcgccccactgctgcccgtgatcgaggatgatagatacgtggtcaagacaatccccagctgccggatgagcaccctggaaattccagccatggccttccacatgtttctgttcggcagcaagaaaaccgagaagctgatcgtggacgtgcacaaccggtacaagagactgttccaggccatgcagaaagaagaagtgaccgccgagaatatcgccagcttcggaatcgccgagagcgacctgcctcagaagatcctggatctgatcagcggcaatgcccacggcaaggatgtggacgccttcatcagactgaccgtggacgacatgctgaccgacaccgagcggagaatcaagagattcaaggacgaccggaagtccattcggagcgccgacaacaagatgggaaagagaggcttcaagcagatctccacaggcaagctggccgacttcctggccaaggacatcgtgctgtttcagcccagcgtgaacgatggcgagaacaagatcaccggcctgaactaccggatcatgcagagcgccattgccgtgtacgatagcggcgacgattacgaggccaagcagcagttcaagctgatgttcgagaaggcccggctgatcggcaagggcacaacagagcctcatccatttctgtacaaggtgttcgcccgcagcatccccgccaatgccgtcgagttctacgagcgctacctgatcgagcggaagttctacctgaccggcctgtccaacgagatcaagaaaggcaacagagtggatgtgcccttcatccggcgggaccagaacaagtggaaaacacccgccatgaagaccctgggcagaatctacagcgaggatctgcccgtggaactgcccagacagatgttcgacaatgagatcaagtcccacctgaagtccctgccacagatggaaggcatcgacttcaacaatgccaacgtgacctatctgatcgccgagtacatgaagagagtgctggacgacgacttccagaccttctaccagtggaaccgcaactaccggtacatggacatgcttaagggcgagtacgacagaaagggctccctgcagcactgcttcaccagcgtggaagagagagaaggcctctggaaagagcgggcctccagaacagagcggtacagaaagcaggccagcaacaagatccgcagcaaccggcagatgagaaacgccagcagcgaagagatcgagacaatcctggataagcggctgagcaacagccggaacgagtaccagaaaagcgagaaagtgatccggcgctacagagtgcaggatgccctgctgtttctgctggccaaaaagaccctgaccgaactggccgatttcgacggcgagaggttcaaactgaaagaaatcatgcccgacgccgagaagggaatcctgagcgagatcatgcccatgagcttcaccttcgagaaaggcggcaagaagtacaccatcaccagcgagggcatgaagctgaagaactacggcgacttctttgtgctggctagcgacaagaggatcggcaacctgctggaactcgtgggcagcgacatcgtgtccaaagaggatatcatggaagagttcaacaaatacgaccagtgcaggcccgagatcagctccatcgtgttcaacctggaaaagtgggccttcgacacataccccgagctgtctgccagagtggaccgggaagagaaggtggacttcaagagcatcctgaaaatcctgctgaacaacaagaacatcaacaaagagcagagcgacatcctgcggaagatccggaacgccttcgatcacaacaattaccccgacaaaggcgtggtggaaatcaaggccctgcctgagatcgccatgagcatcaagaaggcctttggggagtacgccatcatgaagtagtaa

SEQ ID NO: 277 - DNA, 3483 bp, Artificial Sequence
  chemically synthesized
atggactacaaagaccatgacggtgattataaagatcatgacatcgattacaaggatgacgatgacaagggcggaatgggttgttgtttcagcaagacagcggcgaaaggtgaagcagcagcagaaagaccaggcgaggctgcggtagcatcaagtccctccaaggctaatgggcaggaaaacggacacgtcaaagttggaagcggaggcaacatccccgctctggtggaaaaccagaagaagtactttggcacctacagcgtgatggccatgctgaacgctcagaccgtgctggaccacatccagaaggtggccgatattgagggcgagcagaacgagaacaacgagaatctgtggtttcaccccgtgatgagccacctgtacaacgccaagaacggctacgacaagcagcccgagaaaaccatgttcatcatcgagcggctgcagagctacttcccattcctgaagatcatggccgagaaccagagagagtacagcaacggcaagtacaagcagaaccgcgtggaagtgaacagcaacgacatcttcgaggtgctgaagcgcgccttcggcgtgctgaagatgtacagggacctgaccaaccactacaagacctacgaggaaaagctgaacgacggctgcgagttcctgaccagcacagagcaacctctgagcggcatgatcaacaactactacacagtggccctgcggaacatgaacgagagatacggctacaagacagaggacctggccttcatccaggacaagcggttcaagttcgtgaaggacgcctacggcaagaaaaagtcccaagtgaataccggattcttcctgagcctgcaggactacaacggcgacacacagaagaagctgcacctgagcggagtgggaatcgccctgctgatctgcctgttcctggacaagcagtacatcaacatctttctgagcaggctgcccatcttctccagctacaatgcccagagcgaggaacggcggatcatcatcagatccttcggcatcaacagcatcaagctgcccaaggaccggatccacagcgagaagtccaacaagagcgtggccatggatatgctcaacgaagtgaagcggtgccccgacgagctgttcacaacactgtctgccgagaagcagtcccggttcagaatcatcagcgacgaccacaatgaagtgctgatgaagcggagcagcgacagattcgtgcctctgctgctgcagtatatcgattacggcaagctgttcgaccacatcaggttccacgtgaacatgggcaagctgagatacctgctgaaggccgacaagacctgcatcgacggccagaccagagtcagagtgatcgagcagcccctgaacggcttcggcagactggaagaggccgagacaatgcggaagcaagagaacggcaccttcggcaacagcggcatccggatcagagacttcgagaacatgaagcgggacgacgccaatcctgccaactatccctacatcgtggacacctacacacactacatcctggaaaacaacaaggtcgagatgtttatcaacgacaaagaggacagcgccccactgctgcccgtgatcgaggatgatagatacgtggtcaagacaatccccagctgccggatgagcaccctggaaattccagccatggccttccacatgtttctgttcggcagcaagaaaaccgagaagctgatcgtggacgtgcacaaccggtacaagagactgttccaggccatgcagaaagaagaagtgaccgccgagaatatcgccagcttcggaatcgccgagagcgacctgcctcagaagatcctggatctgatcagcggcaatgcccacggcaaggatgtggacgccttcatcagactgaccgtggacgacatgctgaccgacaccgagcggagaatcaagagattcaaggacgaccggaagtccattcggagcgccgacaacaagatgggaaagagaggcttcaagcagatctccacaggcaagctggccgacttcctggccaaggacatcgtgctgtttcagcccagcgtgaacgatggcgagaacaagatcaccggcctgaactaccggatcatgcagagcgccattgccgtgtacgatagcggcgacgattacgaggccaagcagcagttcaagctgatgttcgagaaggcccggctgatcggcaagggcacaacagagcctcatccatttctgtacaaggtgttcgcccgcagcatccccgccaatgccgtcgagttctacgagcgctacctgatcgagcggaagttctacctgaccggcctgtccaacgagatcaagaaaggcaacagagtggatgtgcccttcatccggcgggaccagaacaagtggaaaacacccgccatgaagaccctgggcagaatctacagcgaggatctgcccgtggaactgcccagacagatgttcgacaatgagatcaagtcccacctgaagtccctgccacagatggaaggcatcgacttcaacaatgccaacgtgacctatctgatcgccgagtacatgaagagagtgctggacgacgacttccagaccttctaccagtggaaccgcaactaccggtacatggacatgcttaagggcgagtacgacagaaagggctccctgcagcactgcttcaccagcgtggaagagagagaaggcctctggaaagagcgggcctccagaacagagcggtacagaaagcaggccagcaacaagatccgcagcaaccggcagatgagaaacgccagcagcgaagagatcgagacaatcctggataagcggctgagcaacagccggaacgagtaccagaaaagcgagaaagtgatccggcgctacagagtgcaggatgccctgctgtttctgctggccaaaaagaccctgaccgaactggccgatttcgacggcgagaggttcaaactgaaagaaatcatgcccgacgccgagaagggaatcctgagcgagatcatgcccatgagcttcaccttcgagaaaggcggcaagaagtacaccatcaccagcgagggcatgaagctgaagaactacggcgacttctttgtgctggctagcgacaagaggatcggcaacctgctggaactcgtgggcagcgacatcgtgtccaaagaggatatcatggaagagttcaacaaatacgaccagtgcaggcccgagatcagctccatcgtgttcaacctggaaaagtgggccttcgacacataccccgagctgtctgccagagtggaccgggaagagaaggtggacttcaagagcatcctgaaaatcctgctgaacaacaagaacatcaacaaagagcagagcgacatcctgcggaagatccggaacgccttcgatcacaacaattaccccgacaaaggcgtggtggaaatcaaggccctgcctgagatcgccatgagcatcaagaaggcctttggggagtacgccatcatgaagtagtaa

SEQ ID NO: 278 - DNA, 3405 bp, Artificial Sequence
  chemically synthesized
atggactacaaagaccatgacggtgattataaagatcatgacatcgattacaaggatgacgatgacaagggcggaatgctgctgcccgtccccctgctgctgggcctgctgggcgccgccgccgacggaggcaacatccccgctctggtggaaaaccagaagaagtactttggcacctacagcgtgatggccatgctgaacgctcagaccgtgctggaccacatccagaaggtggccgatattgagggcgagcagaacgagaacaacgagaatctgtggtttcaccccgtgatgagccacctgtacaacgccaagaacggctacgacaagcagcccgagaaaaccatgttcatcatcgagcggctgcagagctacttcccattcctgaagatcatggccgagaaccagagagagtacagcaacggcaagtacaagcagaaccgcgtggaagtgaacagcaacgacatcttcgaggtgctgaagcgcgccttcggcgtgctgaagatgtacagggacctgaccaaccactacaagacctacgaggaaaagctgaacgacggctgcgagttcctgaccagcacagagcaacctctgagcggcatgatcaacaactactacacagtggccctgcggaacatgaacgagagatacggctacaagacagaggacctggccttcatccaggacaagcggttcaagttcgtgaaggacgcctacggcaagaaaaagtcccaagtgaataccggattcttcctgagcctgcaggactacaacggcgacacacagaagaagctgcacctgagcggagtgggaatcgccctgctgatctgcctgttcctggacaagcagtacatcaacatctttctgagcaggctgcccatcttctccagctacaatgcccagagcgaggaacggcggatcatcatcagatccttcggcatcaacagcatcaagctgcccaaggaccggatccacagcgagaagtccaacaagagcgtggccatggatatgctcaacgaagtgaagcggtgccccgacgagctgttcacaacactgtctgccgagaagcagtcccggttcagaatcatcagcgacgaccacaatgaagtgctgatgaagcggagcagcgacagattcgtgcctctgctgctgcagtatatcgattacggcaagctgttcgaccacatcaggttccacgtgaacatgggcaagctgagatacctgctgaaggccgacaagacctgcatcgacggccagaccagagtcagagtgatcgagcagcccctgaacggcttcggcagactggaagaggccgagacaatgcggaagcaagagaacggcaccttcggcaacagcggcatccggatcagagacttcgagaacatgaagcgggacgacgccaatcctgccaactatccctacatcgtggacacctacacacactacatcctggaaaacaacaaggtcgagatgtttatcaacgacaaagaggacagcgccccactgctgcccgtgatcgaggatgatagatacgtggtcaagacaatccccagctgccggatgagcaccctggaaattccagccatggccttccacatgtttctgttcggcagcaagaaaaccgagaagctgatcgtggacgtgcacaaccggtacaagagactgttccaggccatgcagaaagaagaagtgaccgccgagaatatcgccagcttcggaatcgccgagagcgacctgcctcagaagatcctggatctgatcagcggcaatgcccacggcaaggatgtggacgccttcatcagactgaccgtggacgacatgctgaccgacaccgagcggagaatcaagagattcaaggacgaccggaagtccattcggagcgccgacaacaagatgggaaagagaggcttcaagcagatctccacaggcaagctggccgacttcctggccaaggacatcgtgctgtttcagcccagcgtgaacgatggcgagaacaagatcaccggcctgaactaccggatcatgcagagcgccattgccgtgtacgatagcggcgacgattacgaggccaagcagcagttcaagctgatgttcgagaaggcccggctgatcggcaagggcacaacagagcctcatccatttctgtacaaggtgttcgcccgcagcatccccgccaatgccgtcgagttctacgagcgctacctgatcgagcggaagttctacctgaccggcctgtccaacgagatcaagaaaggcaacagagtggatgtgcccttcatccggcgggaccagaacaagtggaaaacacccgccatgaagaccctgggcagaatctacagcgaggatctgcccgtggaactgcccagacagatgttcgacaatgagatcaagtcccacctgaagtccctgccacagatggaaggcatcgacttcaacaatgccaacgtgacctatctgatcgccgagtacatgaagagagtgctggacgacgacttccagaccttctaccagtggaaccgcaactaccggtacatggacatgcttaagggcgagtacgacagaaagggctccctgcagcactgcttcaccagcgtggaagagagagaaggcctctggaaagagcgggcctccagaacagagcggtacagaaagcaggccagcaacaagatccgcagcaaccggcagatgagaaacgccagcagcgaagagatcgagacaatcctggataagcggctgagcaacagccggaacgagtaccagaaaagcgagaaagtgatccggcgctacagagtgcaggatgccctgctgtttctgctggccaaaaagaccctgaccgaactggccgatttcgacggcgagaggttcaaactgaaagaaatcatgcccgacgccgagaagggaatcctgagcgagatcatgcccatgagcttcaccttcgagaaaggcggcaagaagtacaccatcaccagcgagggcatgaagctgaagaactacggcgacttctttgtgctggctagcgacaagaggatcggcaacctgctggaactcgtgggcagcgacatcgtgtccaaagaggatatcatggaagagttcaacaaatacgaccagtgcaggcccgagatcagctccatcgtgttcaacctggaaaagtgggccttcgacacataccccgagctgtctgccagagtggaccgggaagagaaggtggacttcaagagcatcctgaaaatcctgctgaacaacaagaacatcaacaaagagcagagcgacatcctgcggaagatccggaacgccttcgatcacaacaattaccccgacaaaggcgtggtggaaatcaaggccctgcctgagatcgccatgagcatcaagaaggcctttggggagtacgccatcatgaagtagtaa

SEQ ID NO: 279 - DNA, 3384 bp, Artificial Sequence
  chemically synthesized
atggactacaaagaccatgacggtgattataaagatcatgacatcgattacaaggatgacgatgacaagggcggagggatcactctcggcaaggacgagctgtaaggaggcaacatccccgctctggtggaaaaccagaagaagtactttggcacctacagcgtgatggccatgctgaacgctcagaccgtgctggaccacatccagaaggtggccgatattgagggcgagcagaacgagaacaacgagaatctgtggtttcaccccgtgatgagccacctgtacaacgccaagaacggctacgacaagcagcccgagaaaaccatgttcatcatcgagcggctgcagagctacttcccattcctgaagatcatggccgagaaccagagagagtacagcaacggcaagtacaagcagaaccgcgtggaagtgaacagcaacgacatcttcgaggtgctgaagcgcgccttcggcgtgctgaagatgtacagggacctgaccaaccactacaagacctacgaggaaaagctgaacgacggctgcgagttcctgaccagcacagagcaacctctgagcggcatgatcaacaactactacacagtggccctgcggaacatgaacgagagatacggctacaagacagaggacctggccttcatccaggacaagcggttcaagttcgtgaaggacgcctacggcaagaaaaagtcccaagtgaataccggattcttcctgagcctgcaggactacaacggcgacacacagaagaagctgcacctgagcggagtgggaatcgccctgctgatctgcctgttcctggacaagcagtacatcaacatctttctgagcaggctgcccatcttctccagctacaatgcccagagcgaggaacggcggatcatcatcagatccttcggcatcaacagcatcaagctgcccaaggaccggatccacagcgagaagtccaacaagagcgtggccatggatatgctcaacgaagtgaagcggtgccccgacgagctgttcacaacactgtctgccgagaagcagtcccggttcagaatcatcagcgacgaccacaatgaagtgctgatgaagcggagcagcgacagattcgtgcctctgctgctgcagtatatcgattacggcaagctgttcgaccacatcaggttccacgtgaacatgggcaagctgagatacctgctgaaggccgacaagacctgcatcgacggccagaccagagtcagagtgatcgagcagcccctgaacggcttcggcagactggaagaggccgagacaatgcggaagcaagagaacggcaccttcggcaacagcggcatccggatcagagacttcgagaacatgaagcgggacgacgccaatcctgccaactatccctacatcgtggacacctacacacactacatcctggaaaacaacaaggtcgagatgtttatcaacgacaaagaggacagcgccccactgctgcccgtgatcgaggatgatagatacgtggtcaagacaatccccagctgccggatgagcaccctggaaattccagccatggccttccacatgtttctgttcggcagcaagaaaaccgagaagctgatcgtggacgtgcacaaccggtacaagagactgttccaggccatgcagaaagaagaagtgaccgccgagaatatcgccagcttcggaatcgccgagagcgacctgcctcagaagatcctggatctgatcagcggcaatgcccacggcaaggatgtggacgccttcatcagactgaccgtggacgacatgctgaccgacaccgagcggagaatcaagagattcaaggacgaccggaagtccattcggagcgccgacaacaagatgggaaagagaggcttcaagcagatctccacaggcaagctggccgacttcctggccaaggacatcgtgctgtttcagcccagcgtgaacgatggcgagaacaagatcaccggcctgaactaccggatcatgcagagcgccattgccgtgtacgatagcggcgacgattacgaggccaagcagcagttcaagctgatgttcgagaaggcccggctgatcggcaagggcacaacagagcctcatccatttctgtacaaggtgttcgcccgcagcatccccgccaatgccgtcgagttctacgagcgctacctgatcgagcggaagttctacctgaccggcctgtccaacgagatcaagaaaggcaacagagtggatgtgcccttcatccggcgggaccagaacaagtggaaaacacccgccatgaagaccctgggcagaatctacagcgaggatctgcccgtggaactgcccagacagatgttcgacaatgagatcaagtcccacctgaagtccctgccacagatggaaggcatcgacttcaacaatgccaacgtgacctatctgatcgccgagtacatgaagagagtgctggacgacgacttccagaccttctaccagtggaaccgcaactaccggtacatggacatgcttaagggcgagtacgacagaaagggctccctgcagcactgcttcaccagcgtggaagagagagaaggcctctggaaagagcgggcctccagaacagagcggtacagaaagcaggccagcaacaagatccgcagcaaccggcagatgagaaacgccagcagcgaagagatcgagacaatcctggataagcggctgagcaacagccggaacgagtaccagaaaagcgagaaagtgatccggcgctacagagtgcaggatgccctgctgtttctgctggccaaaaagaccctgaccgaactggccgatttcgacggcgagaggttcaaactgaaagaaatcatgcccgacgccgagaagggaatcctgagcgagatcatgcccatgagcttcaccttcgagaaaggcggcaagaagtacaccatcaccagcgagggcatgaagctgaagaactacggcgacttctttgtgctggctagcgacaagaggatcggcaacctgctggaactcgtgggcagcgacatcgtgtccaaagaggatatcatggaagagttcaacaaatacgaccagtgcaggcccgagatcagctccatcgtgttcaacctggaaaagtgggccttcgacacataccccgagctgtctgccagagtggaccgggaagagaaggtggacttcaagagcatcctgaaaatcctgctgaacaacaagaacatcaacaaagagcagagcgacatcctgcggaagatccggaacgccttcgatcacaacaattaccccgacaaaggcgtggtggaaatcaaggccctgcctgagatcgccatgagcatcaagaaggcctttggggagtacgccatcatgaagtagtaa

SEQ ID NO: 280 - DNA, 3366 bp, Artificial Sequence
  chemically synthesized
atggactacaaagaccatgacggtgattataaagatcatgacatcgattacaaggatgacgatgacaagggcggatccaaattataaggaggcaacatccccgctctggtggaaaaccagaagaagtactttggcacctacagcgtgatggccatgctgaacgctcagaccgtgctggaccacatccagaaggtggccgatattgagggcgagcagaacgagaacaacgagaatctgtggtttcaccccgtgatgagccacctgtacaacgccaagaacggctacgacaagcagcccgagaaaaccatgttcatcatcgagcggctgcagagctacttcccattcctgaagatcatggccgagaaccagagagagtacagcaacggcaagtacaagcagaaccgcgtggaagtgaacagcaacgacatcttcgaggtgctgaagcgcgccttcggcgtgctgaagatgtacagggacctgaccaaccactacaagacctacgaggaaaagctgaacgacggctgcgagttcctgaccagcacagagcaacctctgagcggcatgatcaacaactactacacagtggccctgcggaacatgaacgagagatacggctacaagacagaggacctggccttcatccaggacaagcggttcaagttcgtgaaggacgcctacggcaagaaaaagtcccaagtgaataccggattcttcctgagcctgcaggactacaacggcgacacacagaagaagctgcacctgagcggagtgggaatcgccctgctgatctgcctgttcctggacaagcagtacatcaacatctttctgagcaggctgcccatcttctccagctacaatgcccagagcgaggaacggcggatcatcatcagatccttcggcatcaacagcatcaagctgcccaaggaccggatccacagcgagaagtccaacaagagcgtggccatggatatgctcaacgaagtgaagcggtgccccgacgagctgttcacaacactgtctgccgagaagcagtcccggttcagaatcatcagcgacgaccacaatgaagtgctgatgaagcggagcagcgacagattcgtgcctctgctgctgcagtatatcgattacggcaagctgttcgaccacatcaggttccacgtgaacatgggcaagctgagatacctgctgaaggccgacaagacctgcatcgacggccagaccagagtcagagtgatcgagcagcccctgaacggcttcggcagactggaagaggccgagacaatgcggaagcaagagaacggcaccttcggcaacagcggcatccggatcagagacttcgagaacatgaagcgggacgacgccaatcctgccaactatccctacatcgtggacacctacacacactacatcctggaaaacaacaaggtcgagatgtttatcaacgacaaagaggacagcgccccactgctgcccgtgatcgaggatgatagatacgtggtcaagacaatccccagctgccggatgagcaccctggaaattccagccatggccttccacatgtttctgttcggcagcaagaaaaccgagaagctgatcgtggacgtgcacaaccggtacaagagactgttccaggccatgcagaaagaagaagtgaccgccgagaatatcgccagcttcggaatcgccgagagcgacctgcctcagaagatcctggatctgatcagcggcaatgcccacggcaaggatgtggacgccttcatcagactgaccgtggacgacatgctgaccgacaccgagcggagaatcaagagattcaaggacgaccggaagtccattcggagcgccgacaacaagatgggaaagagaggcttcaagcagatctccacaggcaagctggccgacttcctggccaaggacatcgtgctgtttcagcccagcgtgaacgatggcgagaacaagatcaccggcctgaactaccggatcatgcagagcgccattgccgtgtacgatagcggcgacgattacgaggccaagcagcagttcaagctgatgttcgagaaggcccggctgatcggcaagggcacaacagagcctcatccatttctgtacaaggtgttcgcccgcagcatccccgccaatgccgtcgagttctacgagcgctacctgatcgagcggaagttctacctgaccggcctgtccaacgagatcaagaaaggcaacagagtggatgtgcccttcatccggcgggaccagaacaagtggaaaacacccgccatgaagaccctgggcagaatctacagcgaggatctgcccgtggaactgcccagacagatgttcgacaatgagatcaagtcccacctgaagtccctgccacagatggaaggcatcgacttcaacaatgccaacgtgacctatctgatcgccgagtacatgaagagagtgctggacgacgacttccagaccttctaccagtggaaccgcaactaccggtacatggacatgcttaagggcgagtacgacagaaagggctccctgcagcactgcttcaccagcgtggaagagagagaaggcctctggaaagagcgggcctccagaacagagcggtacagaaagcaggccagcaacaagatccgcagcaaccggcagatgagaaacgccagcagcgaagagatcgagacaatcctggataagcggctgagcaacagccggaacgagtaccagaaaagcgagaaagtgatccggcgctacagagtgcaggatgccctgctgtttctgctggccaaaaagaccctgaccgaactggccgatttcgacggcgagaggttcaaactgaaagaaatcatgcccgacgccgagaagggaatcctgagcgagatcatgcccatgagcttcaccttcgagaaaggcggcaagaagtacaccatcaccagcgagggcatgaagctgaagaactacggcgacttctttgtgctggctagcgacaagaggatcggcaacctgctggaactcgtgggcagcgacatcgtgtccaaagaggatatcatggaagagttcaacaaatacgaccagtgcaggcccgagatcagctccatcgtgttcaacctggaaaagtgggccttcgacacataccccgagctgtctgccagagtggaccgggaagagaaggtggacttcaagagcatcctgaaaatcctgctgaacaacaagaacatcaacaaagagcagagcgacatcctgcggaagatccggaacgccttcgatcacaacaattaccccgacaaaggcgtggtggaaatcaaggccctgcctgagatcgccatgagcatcaagaaggcctttggggagtacgccatcatgaagtagtaa

SEQ ID NO: 281 - DNA, 3150 bp, Artificial Sequence
  chemically synthesized
atggactacaaagaccatgacggtgattataaagatcatgacatcgattacaaggatgacgatgacaagggcggaaactcaaagaaaaggtcactggaggacaacgaaacggaaatcaaagtctccagagacacctggaacactaagaacatgcggtccctggaaccgccacgaagcaagaaacggatacatggaggcaacatccccgctctggtggaaaaccagaagaagtactttggcacctacagcgtgatggccatgctgaacgctcagaccgtgctggaccacatccagaaggtggccgatattgagggcgagcagaacgagaacaacgagaatctgtggtttcaccccgtgatgagccacctgtacaacgccaagaacggctacgacaagcagcccgagaaaaccatgttcatcatcgagcggctgcagagctacttcccattcctgaagatcatggccgagaaccagagagagtacagcaacggcaagtacaagcagaaccgcgtggaagtgaacagcaacgacatcttcgaggtgctgaagcgcgccttcggcgtgctgaagatgtacagggacctgaccaaccactacaagacctacgaggaaaagctgaacgacggctgcgagttcctgaccagcacagagcaacctctgagcggcatgatcaacaactactacacagtggccctgcggaacatgaacgagagatacggctacaagacagaggacctggccttcatccaggacaagcggttcaagttcgtgaaggacgcctacggcaagaaaaagtcccaagtgaataccggattcttcctgagcctgcaggactacaacggcgacacacagaagaagctgcacctgagcggagtgggaatcgccctgctgatctgcctgttcctggacaagcagtacatcaacatctttctgagcaggctgcccatcttctccagctacaatgcccagagcgaggaacggcggatcatcatcagatccttcggcatcaacagcatcaagctgcccaaggaccggatccacagcgagaagtccaacaagagcgtggccatggatatgctcaacgaagtgaagcggtgccccgacgagctgttcacaacactgtctgccgagaagcagtcccggttcagaatcatcagcgacgaccacaatgaagtgctgatgaagcggagcagcgacagattcgtgcctctgctgctgcagtatatcgattacggcaagctgttcgaccacatcaggttccacgtgaacatgggcaagctgagatacctgctgaaggccgacaagacctgcatcgacggccagaccagagtcagagtgatcgagcagcccctgaacggcttcggcagactggaagaggccgagacaatgcggaagcaagagaacggcaccttcggcaacagcggcatccggatcagagacttcgagaacatgaagcgggacgacgccaatcctgccaactatccctacatcgtggacacctacacacactacatcctggaaaacaacaaggtcgagatgtttatcaacgacaaagaggacagcgccccactgctgcccgtgatcgaggatgatagatacgtggtcaagacaatccccagctgccggatgagcaccctggaaattccagccatggccttccacatgtttctgttcggcagcaagaaaaccgagaagctgatcgtggacgtgcacaaccggtacaagagactgttccaggccatgcagaaagaagaagtgaccgccgagaatatcgccagcttcggaatcgccgagagcgacctgcctcagaagatcctggatctgatcagcggcaatgcccacggcaaggatgtggacgccttcatcagactgaccgtggacgacatgctgaccgacaccgagcggagaatcaagagattcaaggacgaccggaagtccattcggagcgccgacaacaagatgggaaagagaggcttcaagcagatctccacaggcaagctggccgacttcctggccaaggacatcgtgctgtttcagcccagcgtgaacgatggcgagaacaagatcaccggcctgaactaccggatcatgcagagcgccattgccgtgtacgatagcggcgacgattacgaggccaagcagcagttcaagctgatgttcgagaaggcccggctgatcggcaagggcacaacagagcctcatccatttctgtacaaggtgttcgcccgcagcatccccgccaatgccgtcgagttctacgagcgctacctgatcgagcggaagttctacctgaccggcctgtccaacgagatcaagaaaggcaacagagtggatgtgcccttcatccggcgggaccagaacaagtggaaaacacccgccatgaagaccctgggcagaatctacagcgaggatctgcccgtggaactgcccagacagatgttcgacaatgagatcaagtcccacctgaagtccctgccacagatggaaggcatcgacttcaacaatgccaacgtgacctatctgatcgccgagtacatgaagagagtgctggacgacgacttccagaccttctaccagtggaaccgcaactaccggtacatggacatgcttaagggcgagtacgacagaaagggctccctgcagcactgcttcaccagcgtggaagagagagaaggcctctggaaagagcgggcctccagaacagagcggtacagaaagcaggccagcaacaagatccgcagcaaccggcagatgagaaacgccagcagcgaagagatcgagacaatcctggataagcggctgagcaacagccggaacgagtaccagaaaagcgagaaagtgatccggcgctacagagtgcaggatgccctgctgtttctgctggccaaaaagaccctgaccgaactggccgatttcgacggcgagaggttcaaactgaaagaaatcatgcccgacgccgagaagggaatcctgagcgagatcatgcccatgagcttcaccttcgagaaaggcggcaagaagtacaccatcaccagcgagggcatgaagctgaagaactacggcgacttctttgtgctggctagcgacaagaggatcggcaacctgctggaactcgtgggcagcgacatcgtgtccaaagaggattagtaa

SEQ ID NO: 282 - DNA, 3066 bp, Artificial Sequence
  chemically synthesized
atggactacaaagaccatgacggtgattataaagatcatgacatcgattacaaggatgacgatgacaagggcggacttcaactgcctccacttgaaagactgacactgggaggcaacatccccgctctggtggaaaaccagaagaagtactttggcacctacagcgtgatggccatgctgaacgctcagaccgtgctggaccacatccagaaggtggccgatattgagggcgagcagaacgagaacaacgagaatctgtggtttcaccccgtgatgagccacctgtacaacgccaagaacggctacgacaagcagcccgagaaaaccatgttcatcatcgagcggctgcagagctacttcccattcctgaagatcatggccgagaaccagagagagtacagcaacggcaagtacaagcagaaccgcgtggaagtgaacagcaacgacatcttcgaggtgctgaagcgcgccttcggcgtgctgaagatgtacagggacctgaccaaccactacaagacctacgaggaaaagctgaacgacggctgcgagttcctgaccagcacagagcaacctctgagcggcatgatcaacaactactacacagtggccctgcggaacatgaacgagagatacggctacaagacagaggacctggccttcatccaggacaagcggttcaagttcgtgaaggacgcctacggcaagaaaaagtcccaagtgaataccggattcttcctgagcctgcaggactacaacggcgacacacagaagaagctgcacctgagcggagtgggaatcgccctgctgatctgcctgttcctggacaagcagtacatcaacatctttctgagcaggctgcccatcttctccagctacaatgcccagagcgaggaacggcggatcatcatcagatccttcggcatcaacagcatcaagctgcccaaggaccggatccacagcgagaagtccaacaagagcgtggccatggatatgctcaacgaagtgaagcggtgccccgacgagctgttcacaacactgtctgccgagaagcagtcccggttcagaatcatcagcgacgaccacaatgaagtgctgatgaagcggagcagcgacagattcgtgcctctgctgctgcagtatatcgattacggcaagctgttcgaccacatcaggttccacgtgaacatgggcaagctgagatacctgctgaaggccgacaagacctgcatcgacggccagaccagagtcagagtgatcgagcagcccctgaacggcttcggcagactggaagaggccgagacaatgcggaagcaagagaacggcaccttcggcaacagcggcatccggatcagagacttcgagaacatgaagcgggacgacgccaatcctgccaactatccctacatcgtggacacctacacacactacatcctggaaaacaacaaggtcgagatgtttatcaacgacaaagaggacagcgccccactgctgcccgtgatcgaggatgatagatacgtggtcaagacaatccccagctgccggatgagcaccctggaaattccagccatggccttccacatgtttctgttcggcagcaagaaaaccgagaagctgatcgtggacgtgcacaaccggtacaagagactgttccaggccatgcagaaagaagaagtgaccgccgagaatatcgccagcttcggaatcgccgagagcgacctgcctcagaagatcctggatctgatcagcggcaatgcccacggcaaggatgtggacgccttcatcagactgaccgtggacgacatgctgaccgacaccgagcggagaatcaagagattcaaggacgaccggaagtccattcggagcgccgacaacaagatgggaaagagaggcttcaagcagatctccacaggcaagctggccgacttcctggccaaggacatcgtgctgtttcagcccagcgtgaacgatggcgagaacaagatcaccggcctgaactaccggatcatgcagagcgccattgccgtgtacgatagcggcgacgattacgaggccaagcagcagttcaagctgatgttcgagaaggcccggctgatcggcaagggcacaacagagcctcatccatttctgtacaaggtgttcgcccgcagcatccccgccaatgccgtcgagttctacgagcgctacctgatcgagcggaagttctacctgaccggcctgtccaacgagatcaagaaaggcaacagagtggatgtgcccttcatccggcgggaccagaacaagtggaaaacacccgccatgaagaccctgggcagaatctacagcgaggatctgcccgtggaactgcccagacagatgttcgacaatgagatcaagtcccacctgaagtccctgccacagatggaaggcatcgacttcaacaatgccaacgtgacctatctgatcgccgagtacatgaagagagtgctggacgacgacttccagaccttctaccagtggaaccgcaactaccggtacatggacatgcttaagggcgagtacgacagaaagggctccctgcagcactgcttcaccagcgtggaagagagagaaggcctctggaaagagcgggcctccagaacagagcggtacagaaagcaggccagcaacaagatccgcagcaaccggcagatgagaaacgccagcagcgaagagatcgagacaatcctggataagcggctgagcaacagccggaacgagtaccagaaaagcgagaaagtgatccggcgctacagagtgcaggatgccctgctgtttctgctggccaaaaagaccctgaccgaactggccgatttcgacggcgagaggttcaaactgaaagaaatcatgcccgacgccgagaagggaatcctgagcgagatcatgcccatgagcttcaccttcgagaaaggcggcaagaagtacaccatcaccagcgagggcatgaagctgaagaactacggcgacttctttgtgctggctagcgacaagaggatcggcaacctgctggaactcgtgggcagcgacatcgtgtccaaagaggattagtaa

SEQ ID NO: 283 - DNA, 3081 bp, Artificial Sequence
  chemically synthesized
atggactacaaagaccatgacggtgattataaagatcatgacatcgattacaaggatgacgatgacaagggcggaggatcccttcaactgcctccacttgaaagactgacactgggtagttccggaggcaacatccccgctctggtggaaaaccagaagaagtactttggcacctacagcgtgatggccatgctgaacgctcagaccgtgctggaccacatccagaaggtggccgatattgagggcgagcagaacgagaacaacgagaatctgtggtttcaccccgtgatgagccacctgtacaacgccaagaacggctacgacaagcagcccgagaaaaccatgttcatcatcgagcggctgcagagctacttcccattcctgaagatcatggccgagaaccagagagagtacagcaacggcaagtacaagcagaaccgcgtggaagtgaacagcaacgacatcttcgaggtgctgaagcgcgccttcggcgtgctgaagatgtacagggacctgaccaaccactacaagacctacgaggaaaagctgaacgacggctgcgagttcctgaccagcacagagcaacctctgagcggcatgatcaacaactactacacagtggccctgcggaacatgaacgagagatacggctacaagacagaggacctggccttcatccaggacaagcggttcaagttcgtgaaggacgcctacggcaagaaaaagtcccaagtgaataccggattcttcctgagcctgcaggactacaacggcgacacacagaagaagctgcacctgagcggagtgggaatcgccctgctgatctgcctgttcctggacaagcagtacatcaacatctttctgagcaggctgcccatcttctccagctacaatgcccagagcgaggaacggcggatcatcatcagatccttcggcatcaacagcatcaagctgcccaaggaccggatccacagcgagaagtccaacaagagcgtggccatggatatgctcaacgaagtgaagcggtgccccgacgagctgttcacaacactgtctgccgagaagcagtcccggttcagaatcatcagcgacgaccacaatgaagtgctgatgaagcggagcagcgacagattcgtgcctctgctgctgcagtatatcgattacggcaagctgttcgaccacatcaggttccacgtgaacatgggcaagctgagatacctgctgaaggccgacaagacctgcatcgacggccagaccagagtcagagtgatcgagcagcccctgaacggcttcggcagactggaagaggccgagacaatgcggaagcaagagaacggcaccttcggcaacagcggcatccggatcagagacttcgagaacatgaagcgggacgacgccaatcctgccaactatccctacatcgtggacacctacacacactacatcctggaaaacaacaaggtcgagatgtttatcaacgacaaagaggacagcgccccactgctgcccgtgatcgaggatgatagatacgtggtcaagacaatccccagctgccggatgagcaccctggaaattccagccatggccttccacatgtttctgttcggcagcaagaaaaccgagaagctgatcgtggacgtgcacaaccggtacaagagactgttccaggccatgcagaaagaagaagtgaccgccgagaatatcgccagcttcggaatcgccgagagcgacctgcctcagaagatcctggatctgatcagcggcaatgcccacggcaaggatgtggacgccttcatcagactgaccgtggacgacatgctgaccgacaccgagcggagaatcaagagattcaaggacgaccggaagtccattcggagcgccgacaacaagatgggaaagagaggcttcaagcagatctccacaggcaagctggccgacttcctggccaaggacatcgtgctgtttcagcccagcgtgaacgatggcgagaacaagatcaccggcctgaactaccggatcatgcagagcgccattgccgtgtacgatagcggcgacgattacgaggccaagcagcagttcaagctgatgttcgagaaggcccggctgatcggcaagggcacaacagagcctcatccatttctgtacaaggtgttcgcccgcagcatccccgccaatgccgtcgagttctacgagcgctacctgatcgagcggaagttctacctgaccggcctgtccaacgagatcaagaaaggcaacagagtggatgtgcccttcatccggcgggaccagaacaagtggaaaacacccgccatgaagaccctgggcagaatctacagcgaggatctgcccgtggaactgcccagacagatgttcgacaatgagatcaagtcccacctgaagtccctgccacagatggaaggcatcgacttcaacaatgccaacgtgacctatctgatcgccgagtacatgaagagagtgctggacgacgacttccagaccttctaccagtggaaccgcaactaccggtacatggacatgcttaagggcgagtacgacagaaagggctccctgcagcactgcttcaccagcgtggaagagagagaaggcctctggaaagagcgggcctccagaacagagcggtacagaaagcaggccagcaacaagatccgcagcaaccggcagatgagaaacgccagcagcgaagagatcgagacaatcctggataagcggctgagcaacagccggaacgagtaccagaaaagcgagaaagtgatccggcgctacagagtgcaggatgccctgctgtttctgctggccaaaaagaccctgaccgaactggccgatttcgacggcgagaggttcaaactgaaagaaatcatgcccgacgccgagaagggaatcctgagcgagatcatgcccatgagcttcaccttcgagaaaggcggcaagaagtacaccatcaccagcgagggcatgaagctgaagaactacggcgacttctttgtgctggctagcgacaagaggatcggcaacctgctggaactcgtgggcagcgacatcgtgtccaaagaggattagtaa

SEQ ID NO: 284 - DNA, 3129 bp, Artificial Sequence
  chemically synthesized
atggactacaaagaccatgacggtgattataaagatcatgacatcgattacaaggatgacgatgacaagggcggaatgagtgtgttgacgccgttgcttctgcgagggcttaccgggtctgctagaagacttccggtccccagggccaagatacatagcctcggagacccgggaggcaacatccccgctctggtggaaaaccagaagaagtactttggcacctacagcgtgatggccatgctgaacgctcagaccgtgctggaccacatccagaaggtggccgatattgagggcgagcagaacgagaacaacgagaatctgtggtttcaccccgtgatgagccacctgtacaacgccaagaacggctacgacaagcagcccgagaaaaccatgttcatcatcgagcggctgcagagctacttcccattcctgaagatcatggccgagaaccagagagagtacagcaacggcaagtacaagcagaaccgcgtggaagtgaacagcaacgacatcttcgaggtgctgaagcgcgccttcggcgtgctgaagatgtacagggacctgaccaaccactacaagacctacgaggaaaagctgaacgacggctgcgagttcctgaccagcacagagcaacctctgagcggcatgatcaacaactactacacagtggccctgcggaacatgaacgagagatacggctacaagacagaggacctggccttcatccaggacaagcggttcaagttcgtgaaggacgcctacggcaagaaaaagtcccaagtgaataccggattcttcctgagcctgcaggactacaacggcgacacacagaagaagctgcacctgagcggagtgggaatcgccctgctgatctgcctgttcctggacaagcagtacatcaacatctttctgagcaggctgcccatcttctccagctacaatgcccagagcgaggaacggcggatcatcatcagatccttcggcatcaacagcatcaagctgcccaaggaccggatccacagcgagaagtccaacaagagcgtggccatggatatgctcaacgaagtgaagcggtgccccgacgagctgttcacaacactgtctgccgagaagcagtcccggttcagaatcatcagcgacgaccacaatgaagtgctgatgaagcggagcagcgacagattcgtgcctctgctgctgcagtatatcgattacggcaagctgttcgaccacatcaggttccacgtgaacatgggcaagctgagatacctgctgaaggccgacaagacctgcatcgacggccagaccagagtcagagtgatcgagcagcccctgaacggcttcggcagactggaagaggccgagacaatgcggaagcaagagaacggcaccttcggcaacagcggcatccggatcagagacttcgagaacatgaagcgggacgacgccaatcctgccaactatccctacatcgtggacacctacacacactacatcctggaaaacaacaaggtcgagatgtttatcaacgacaaagaggacagcgccccactgctgcccgtgatcgaggatgatagatacgtggtcaagacaatccccagctgccggatgagcaccctggaaattccagccatggccttccacatgtttctgttcggcagcaagaaaaccgagaagctgatcgtggacgtgcacaaccggtacaagagactgttccaggccatgcagaaagaagaagtgaccgccgagaatatcgccagcttcggaatcgccgagagcgacctgcctcagaagatcctggatctgatcagcggcaatgcccacggcaaggatgtggacgccttcatcagactgaccgtggacgacatgctgaccgacaccgagcggagaatcaagagattcaaggacgaccggaagtccattcggagcgccgacaacaagatgggaaagagaggcttcaagcagatctccacaggcaagctggccgacttcctggccaaggacatcgtgctgtttcagcccagcgtgaacgatggcgagaacaagatcaccggcctgaactaccggatcatgcagagcgccattgccgtgtacgatagcggcgacgattacgaggccaagcagcagttcaagctgatgttcgagaaggcccggctgatcggcaagggcacaacagagcctcatccatttctgtacaaggtgttcgcccgcagcatccccgccaatgccgtcgagttctacgagcgctacctgatcgagcggaagttctacctgaccggcctgtccaacgagatcaagaaaggcaacagagtggatgtgcccttcatccggcgggaccagaacaagtggaaaacacccgccatgaagaccctgggcagaatctacagcgaggatctgcccgtggaactgcccagacagatgttcgacaatgagatcaagtcccacctgaagtccctgccacagatggaaggcatcgacttcaacaatgccaacgtgacctatctgatcgccgagtacatgaagagagtgctggacgacgacttccagaccttctaccagtggaaccgcaactaccggtacatggacatgcttaagggcgagtacgacagaaagggctccctgcagcactgcttcaccagcgtggaagagagagaaggcctctggaaagagcgggcctccagaacagagcggtacagaaagcaggccagcaacaagatccgcagcaaccggcagatgagaaacgccagcagcgaagagatcgagacaatcctggataagcggctgagcaacagccggaacgagtaccagaaaagcgagaaagtgatccggcgctacagagtgcaggatgccctgctgtttctgctggccaaaaagaccctgaccgaactggccgatttcgacggcgagaggttcaaactgaaagaaatcatgcccgacgccgagaagggaatcctgagcgagatcatgcccatgagcttcaccttcgagaaaggcggcaagaagtacaccatcaccagcgagggcatgaagctgaagaactacggcgacttctttgtgctggctagcgacaagaggatcggcaacctgctggaactcgtgggcagcgacatcgtgtccaaagaggattagtaa

SEQ ID NO: 285 - DNA, 3423 bp, Artificial Sequence
  chemically synthesized
atggactacaaagaccatgacggtgattataaagatcatgacatcgattacaaggatgacgatgacaagggcggaatgagtgtgttgacgccgttgcttctgcgagggcttaccgggtctgctagaagacttccggtccccagggccaagatacatagcctcggagacccgatgtctgtgctcactcctctgcttttgcgaggactgactgggtccgccagacgactcccggtgccgagagctaaaatccatagcctgggaaaattggcaactatgtcagtcctgacgccgcttcttctccggggtcttacagggtctgcaagaaggctgcctgtacctcgggcgaaaattcatagcttgggcgacccgatgagtgtattgacgcccctgttgctgagaggattgactgggtcagcgcgccggctccctgtcccccgagctaagattcactcccttggtaagctgggaggcaacatccccgctctggtggaaaaccagaagaagtactttggcacctacagcgtgatggccatgctgaacgctcagaccgtgctggaccacatccagaaggtggccgatattgagggcgagcagaacgagaacaacgagaatctgtggtttcaccccgtgatgagccacctgtacaacgccaagaacggctacgacaagcagcccgagaaaaccatgttcatcatcgagcggctgcagagctacttcccattcctgaagatcatggccgagaaccagagagagtacagcaacggcaagtacaagcagaaccgcgtggaagtgaacagcaacgacatcttcgaggtgctgaagcgcgccttcggcgtgctgaagatgtacagggacctgaccaaccactacaagacctacgaggaaaagctgaacgacggctgcgagttcctgaccagcacagagcaacctctgagcggcatgatcaacaactactacacagtggccctgcggaacatgaacgagagatacggctacaagacagaggacctggccttcatccaggacaagcggttcaagttcgtgaaggacgcctacggcaagaaaaagtcccaagtgaataccggattcttcctgagcctgcaggactacaacggcgacacacagaagaagctgcacctgagcggagtgggaatcgccctgctgatctgcctgttcctggacaagcagtacatcaacatctttctgagcaggctgcccatcttctccagctacaatgcccagagcgaggaacggcggatcatcatcagatccttcggcatcaacagcatcaagctgcccaaggaccggatccacagcgagaagtccaacaagagcgtggccatggatatgctcaacgaagtgaagcggtgccccgacgagctgttcacaacactgtctgccgagaagcagtcccggttcagaatcatcagcgacgaccacaatgaagtgctgatgaagcggagcagcgacagattcgtgcctctgctgctgcagtatatcgattacggcaagctgttcgaccacatcaggttccacgtgaacatgggcaagctgagatacctgctgaaggccgacaagacctgcatcgacggccagaccagagtcagagtgatcgagcagcccctgaacggcttcggcagactggaagaggccgagacaatgcggaagcaagagaacggcaccttcggcaacagcggcatccggatcagagacttcgagaacatgaagcgggacgacgccaatcctgccaactatccctacatcgtggacacctacacacactacatcctggaaaacaacaaggtcgagatgtttatcaacgacaaagaggacagcgccccactgctgcccgtgatcgaggatgatagatacgtggtcaagacaatccccagctgccggatgagcaccctggaaattccagccatggccttccacatgtttctgttcggcagcaagaaaaccgagaagctgatcgtggacgtgcacaaccggtacaagagactgttccaggccatgcagaaagaagaagtgaccgccgagaatatcgccagcttcggaatcgccgagagcgacctgcctcagaagatcctggatctgatcagcggcaatgcccacggcaaggatgtggacgccttcatcagactgaccgtggacgacatgctgaccgacaccgagcggagaatcaagagattcaaggacgaccggaagtccattcggagcgccgacaacaagatgggaaagagaggcttcaagcagatctccacaggcaagctggccgacttcctggccaaggacatcgtgctgtttcagcccagcgtgaacgatggcgagaacaagatcaccggcctgaactaccggatcatgcagagcgccattgccgtgtacgatagcggcgacgattacgaggccaagcagcagttcaagctgatgttcgagaaggcccggctgatcggcaagggcacaacagagcctcatccatttctgtacaaggtgttcgcccgcagcatccccgccaatgccgtcgagttctacgagcgctacctgatcgagcggaagttctacctgaccggcctgtccaacgagatcaagaaaggcaacagagtggatgtgcccttcatccggcgggaccagaacaagtggaaaacacccgccatgaagaccctgggcagaatctacagcgaggatctgcccgtggaactgcccagacagatgttcgacaatgagatcaagtcccacctgaagtccctgccacagatggaaggcatcgacttcaacaatgccaacgtgacctatctgatcgccgagtacatgaagagagtgctggacgacgacttccagaccttctaccagtggaaccgcaactaccggtacatggacatgcttaagggcgagtacgacagaaagggctccctgcagcactgcttcaccagcgtggaagagagagaaggcctctggaaagagcgggcctccagaacagagcggtacagaaagcaggccagcaacaagatccgcagcaaccggcagatgagaaacgccagcagcgaagagatcgagacaatcctggataagcggctgagcaacagccggaacgagtaccagaaaagcgagaaagtgatccggcgctacagagtgcaggatgccctgctgtttctgctggccaaaaagaccctgaccgaactggccgatttcgacggcgagaggttcaaactgaaagaaatcatgcccgacgccgagaagggaatcctgagcgagatcatgcccatgagcttcaccttcgagaaaggcggcaagaagtacaccatcaccagcgagggcatgaagctgaagaactacggcgacttctttgtgctggctagcgacaagaggatcggcaacctgctggaactcgtgggcagcgacatcgtgtccaaagaggattagtaa

SEQ ID NO: 286 - DNA, 3093 bp, Artificial Sequence
  chemically synthesized
atggactacaaagaccatgacggtgattataaagatcatgacatcgattacaaggatgacgatgacaagggcggaatgtacaggatgcaactcctgtcttgcattgcactaagtcttgcacttgtcacgaattccggaggcaacatccccgctctggtggaaaaccagaagaagtactttggcacctacagcgtgatggccatgctgaacgctcagaccgtgctggaccacatccagaaggtggccgatattgagggcgagcagaacgagaacaacgagaatctgtggtttcaccccgtgatgagccacctgtacaacgccaagaacggctacgacaagcagcccgagaaaaccatgttcatcatcgagcggctgcagagctacttcccattcctgaagatcatggccgagaaccagagagagtacagcaacggcaagtacaagcagaaccgcgtggaagtgaacagcaacgacatcttcgaggtgctgaagcgcgccttcggcgtgctgaagatgtacagggacctgaccaaccactacaagacctacgaggaaaagctgaacgacggctgcgagttcctgaccagcacagagcaacctctgagcggcatgatcaacaactactacacagtggccctgcggaacatgaacgagagatacggctacaagacagaggacctggccttcatccaggacaagcggttcaagttcgtgaaggacgcctacggcaagaaaaagtcccaagtgaataccggattcttcctgagcctgcaggactacaacggcgacacacagaagaagctgcacctgagcggagtgggaatcgccctgctgatctgcctgttcctggacaagcagtacatcaacatctttctgagcaggctgcccatcttctccagctacaatgcccagagcgaggaacggcggatcatcatcagatccttcggcatcaacagcatcaagctgcccaaggaccggatccacagcgagaagtccaacaagagcgtggccatggatatgctcaacgaagtgaagcggtgccccgacgagctgttcacaacactgtctgccgagaagcagtcccggttcagaatcatcagcgacgaccacaatgaagtgctgatgaagcggagcagcgacagattcgtgcctctgctgctgcagtatatcgattacggcaagctgttcgaccacatcaggttccacgtgaacatgggcaagctgagatacctgctgaaggccgacaagacctgcatcgacggccagaccagagtcagagtgatcgagcagcccctgaacggcttcggcagactggaagaggccgagacaatgcggaagcaagagaacggcaccttcggcaacagcggcatccggatcagagacttcgagaacatgaagcgggacgacgccaatcctgccaactatccctacatcgtggacacctacacacactacatcctggaaaacaacaaggtcgagatgtttatcaacgacaaagaggacagcgccccactgctgcccgtgatcgaggatgatagatacgtggtcaagacaatccccagctgccggatgagcaccctggaaattccagccatggccttccacatgtttctgttcggcagcaagaaaaccgagaagctgatcgtggacgtgcacaaccggtacaagagactgttccaggccatgcagaaagaagaagtgaccgccgagaatatcgccagcttcggaatcgccgagagcgacctgcctcagaagatcctggatctgatcagcggcaatgcccacggcaaggatgtggacgccttcatcagactgaccgtggacgacatgctgaccgacaccgagcggagaatcaagagattcaaggacgaccggaagtccattcggagcgccgacaacaagatgggaaagagaggcttcaagcagatctccacaggcaagctggccgacttcctggccaaggacatcgtgctgtttcagcccagcgtgaacgatggcgagaacaagatcaccggcctgaactaccggatcatgcagagcgccattgccgtgtacgatagcggcgacgattacgaggccaagcagcagttcaagctgatgttcgagaaggcccggctgatcggcaagggcacaacagagcctcatccatttctgtacaaggtgttcgcccgcagcatccccgccaatgccgtcgagttctacgagcgctacctgatcgagcggaagttctacctgaccggcctgtccaacgagatcaagaaaggcaacagagtggatgtgcccttcatccggcgggaccagaacaagtggaaaacacccgccatgaagaccctgggcagaatctacagcgaggatctgcccgtggaactgcccagacagatgttcgacaatgagatcaagtcccacctgaagtccctgccacagatggaaggcatcgacttcaacaatgccaacgtgacctatctgatcgccgagtacatgaagagagtgctggacgacgacttccagaccttctaccagtggaaccgcaactaccggtacatggacatgcttaagggcgagtacgacagaaagggctccctgcagcactgcttcaccagcgtggaagagagagaaggcctctggaaagagcgggcctccagaacagagcggtacagaaagcaggccagcaacaagatccgcagcaaccggcagatgagaaacgccagcagcgaagagatcgagacaatcctggataagcggctgagcaacagccggaacgagtaccagaaaagcgagaaagtgatccggcgctacagagtgcaggatgccctgctgtttctgctggccaaaaagaccctgaccgaactggccgatttcgacggcgagaggttcaaactgaaagaaatcatgcccgacgccgagaagggaatcctgagcgagatcatgcccatgagcttcaccttcgagaaaggcggcaagaagtacaccatcaccagcgagggcatgaagctgaagaactacggcgacttctttgtgctggctagcgacaagaggatcggcaacctgctggaactcgtgggcagcgacatcgtgtccaaagaggattagtaa

SEQ ID NO: 287 - DNA, 3162 bp, Artificial Sequence
  chemically synthesized
atggactacaaagaccatgacggtgattataaagatcatgacatcgattacaaggatgacgatgacaagggcggaatgggttgttgtttcagcaagacagcggcgaaaggtgaagcagcagcagaaagaccaggcgaggctgcggtagcatcaagtccctccaaggctaatgggcaggaaaacggacacgtcaaagttggaagcggaggcaacatccccgctctggtggaaaaccagaagaagtactttggcacctacagcgtgatggccatgctgaacgctcagaccgtgctggaccacatccagaaggtggccgatattgagggcgagcagaacgagaacaacgagaatctgtggtttcaccccgtgatgagccacctgtacaacgccaagaacggctacgacaagcagcccgagaaaaccatgttcatcatcgagcggctgcagagctacttcccattcctgaagatcatggccgagaaccagagagagtacagcaacggcaagtacaagcagaaccgcgtggaagtgaacagcaacgacatcttcgaggtgctgaagcgcgccttcggcgtgctgaagatgtacagggacctgaccaaccactacaagacctacgaggaaaagctgaacgacggctgcgagttcctgaccagcacagagcaacctctgagcggcatgatcaacaactactacacagtggccctgcggaacatgaacgagagatacggctacaagacagaggacctggccttcatccaggacaagcggttcaagttcgtgaaggacgcctacggcaagaaaaagtcccaagtgaataccggattcttcctgagcctgcaggactacaacggcgacacacagaagaagctgcacctgagcggagtgggaatcgccctgctgatctgcctgttcctggacaagcagtacatcaacatctttctgagcaggctgcccatcttctccagctacaatgcccagagcgaggaacggcggatcatcatcagatccttcggcatcaacagcatcaagctgcccaaggaccggatccacagcgagaagtccaacaagagcgtggccatggatatgctcaacgaagtgaagcggtgccccgacgagctgttcacaacactgtctgccgagaagcagtcccggttcagaatcatcagcgacgaccacaatgaagtgctgatgaagcggagcagcgacagattcgtgcctctgctgctgcagtatatcgattacggcaagctgttcgaccacatcaggttccacgtgaacatgggcaagctgagatacctgctgaaggccgacaagacctgcatcgacggccagaccagagtcagagtgatcgagcagcccctgaacggcttcggcagactggaagaggccgagacaatgcggaagcaagagaacggcaccttcggcaacagcggcatccggatcagagacttcgagaacatgaagcgggacgacgccaatcctgccaactatccctacatcgtggacacctacacacactacatcctggaaaacaacaaggtcgagatgtttatcaacgacaaagaggacagcgccccactgctgcccgtgatcgaggatgatagatacgtggtcaagacaatccccagctgccggatgagcaccctggaaattccagccatggccttccacatgtttctgttcggcagcaagaaaaccgagaagctgatcgtggacgtgcacaaccggtacaagagactgttccaggccatgcagaaagaagaagtgaccgccgagaatatcgccagcttcggaatcgccgagagcgacctgcctcagaagatcctggatctgatcagcggcaatgcccacggcaaggatgtggacgccttcatcagactgaccgtggacgacatgctgaccgacaccgagcggagaatcaagagattcaaggacgaccggaagtccattcggagcgccgacaacaagatgggaaagagaggcttcaagcagatctccacaggcaagctggccgacttcctggccaaggacatcgtgctgtttcagcccagcgtgaacgatggcgagaacaagatcaccggcctgaactaccggatcatgcagagcgccattgccgtgtacgatagcggcgacgattacgaggccaagcagcagttcaagctgatgttcgagaaggcccggctgatcggcaagggcacaacagagcctcatccatttctgtacaaggtgttcgcccgcagcatccccgccaatgccgtcgagttctacgagcgctacctgatcgagcggaagttctacctgaccggcctgtccaacgagatcaagaaaggcaacagagtggatgtgcccttcatccggcgggaccagaacaagtggaaaacacccgccatgaagaccctgggcagaatctacagcgaggatctgcccgtggaactgcccagacagatgttcgacaatgagatcaagtcccacctgaagtccctgccacagatggaaggcatcgacttcaacaatgccaacgtgacctatctgatcgccgagtacatgaagagagtgctggacgacgacttccagaccttctaccagtggaaccgcaactaccggtacatggacatgcttaagggcgagtacgacagaaagggctccctgcagcactgcttcaccagcgtggaagagagagaaggcctctggaaagagcgggcctccagaacagagcggtacagaaagcaggccagcaacaagatccgcagcaaccggcagatgagaaacgccagcagcgaagagatcgagacaatcctggataagcggctgagcaacagccggaacgagtaccagaaaagcgagaaagtgatccggcgctacagagtgcaggatgccctgctgtttctgctggccaaaaagaccctgaccgaactggccgatttcgacggcgagaggttcaaactgaaagaaatcatgcccgacgccgagaagggaatcctgagcgagatcatgcccatgagcttcaccttcgagaaaggcggcaagaagtacaccatcaccagcgagggcatgaagctgaagaactacggcgacttctttgtgctggctagcgacaagaggatcggcaacctgctggaactcgtgggcagcgacatcgtgtccaaagaggattagtaa

SEQ ID NO: 288 - DNA, 3084 bp, Artificial Sequence
  chemically synthesized
atggactacaaagaccatgacggtgattataaagatcatgacatcgattacaaggatgacgatgacaagggcggaatgctgctgcccgtccccctgctgctgggcctgctgggcgccgccgccgacggaggcaacatccccgctctggtggaaaaccagaagaagtactttggcacctacagcgtgatggccatgctgaacgctcagaccgtgctggaccacatccagaaggtggccgatattgagggcgagcagaacgagaacaacgagaatctgtggtttcaccccgtgatgagccacctgtacaacgccaagaacggctacgacaagcagcccgagaaaaccatgttcatcatcgagcggctgcagagctacttcccattcctgaagatcatggccgagaaccagagagagtacagcaacggcaagtacaagcagaaccgcgtggaagtgaacagcaacgacatcttcgaggtgctgaagcgcgccttcggcgtgctgaagatgtacagggacctgaccaaccactacaagacctacgaggaaaagctgaacgacggctgcgagttcctgaccagcacagagcaacctctgagcggcatgatcaacaactactacacagtggccctgcggaacatgaacgagagatacggctacaagacagaggacctggccttcatccaggacaagcggttcaagttcgtgaaggacgcctacggcaagaaaaagtcccaagtgaataccggattcttcctgagcctgcaggactacaacggcgacacacagaagaagctgcacctgagcggagtgggaatcgccctgctgatctgcctgttcctggacaagcagtacatcaacatctttctgagcaggctgcccatcttctccagctacaatgcccagagcgaggaacggcggatcatcatcagatccttcggcatcaacagcatcaagctgcccaaggaccggatccacagcgagaagtccaacaagagcgtggccatggatatgctcaacgaagtgaagcggtgccccgacgagctgttcacaacactgtctgccgagaagcagtcccggttcagaatcatcagcgacgaccacaatgaagtgctgatgaagcggagcagcgacagattcgtgcctctgctgctgcagtatatcgattacggcaagctgttcgaccacatcaggttccacgtgaacatgggcaagctgagatacctgctgaaggccgacaagacctgcatcgacggccagaccagagtcagagtgatcgagcagcccctgaacggcttcggcagactggaagaggccgagacaatgcggaagcaagagaacggcaccttcggcaacagcggcatccggatcagagacttcgagaacatgaagcgggacgacgccaatcctgccaactatccctacatcgtggacacctacacacactacatcctggaaaacaacaaggtcgagatgtttatcaacgacaaagaggacagcgccccactgctgcccgtgatcgaggatgatagatacgtggtcaagacaatccccagctgccggatgagcaccctggaaattccagccatggccttccacatgtttctgttcggcagcaagaaaaccgagaagctgatcgtggacgtgcacaaccggtacaagagactgttccaggccatgcagaaagaagaagtgaccgccgagaatatcgccagcttcggaatcgccgagagcgacctgcctcagaagatcctggatctgatcagcggcaatgcccacggcaaggatgtggacgccttcatcagactgaccgtggacgacatgctgaccgacaccgagcggagaatcaagagattcaaggacgaccggaagtccattcggagcgccgacaacaagatgggaaagagaggcttcaagcagatctccacaggcaagctggccgacttcctggccaaggacatcgtgctgtttcagcccagcgtgaacgatggcgagaacaagatcaccggcctgaactaccggatcatgcagagcgccattgccgtgtacgatagcggcgacgattacgaggccaagcagcagttcaagctgatgttcgagaaggcccggctgatcggcaagggcacaacagagcctcatccatttctgtacaaggtgttcgcccgcagcatccccgccaatgccgtcgagttctacgagcgctacctgatcgagcggaagttctacctgaccggcctgtccaacgagatcaagaaaggcaacagagtggatgtgcccttcatccggcgggaccagaacaagtggaaaacacccgccatgaagaccctgggcagaatctacagcgaggatctgcccgtggaactgcccagacagatgttcgacaatgagatcaagtcccacctgaagtccctgccacagatggaaggcatcgacttcaacaatgccaacgtgacctatctgatcgccgagtacatgaagagagtgctggacgacgacttccagaccttctaccagtggaaccgcaactaccggtacatggacatgcttaagggcgagtacgacagaaagggctccctgcagcactgcttcaccagcgtggaagagagagaaggcctctggaaagagcgggcctccagaacagagcggtacagaaagcaggccagcaacaagatccgcagcaaccggcagatgagaaacgccagcagcgaagagatcgagacaatcctggataagcggctgagcaacagccggaacgagtaccagaaaagcgagaaagtgatccggcgctacagagtgcaggatgccctgctgtttctgctggccaaaaagaccctgaccgaactggccgatttcgacggcgagaggttcaaactgaaagaaatcatgcccgacgccgagaagggaatcctgagcgagatcatgcccatgagcttcaccttcgagaaaggcggcaagaagtacaccatcaccagcgagggcatgaagctgaagaactacggcgacttctttgtgctggctagcgacaagaggatcggcaacctgctggaactcgtgggcagcgacatcgtgtccaaagaggattagtaa

SEQ ID NO: 289 - DNA, 3063 bp, Artificial Sequence
  chemically synthesized
atggactacaaagaccatgacggtgattataaagatcatgacatcgattacaaggatgacgatgacaagggcggagggatcactctcggcaaggacgagctgtaaggaggcaacatccccgctctggtggaaaaccagaagaagtactttggcacctacagcgtgatggccatgctgaacgctcagaccgtgctggaccacatccagaaggtggccgatattgagggcgagcagaacgagaacaacgagaatctgtggtttcaccccgtgatgagccacctgtacaacgccaagaacggctacgacaagcagcccgagaaaaccatgttcatcatcgagcggctgcagagctacttcccattcctgaagatcatggccgagaaccagagagagtacagcaacggcaagtacaagcagaaccgcgtggaagtgaacagcaacgacatcttcgaggtgctgaagcgcgccttcggcgtgctgaagatgtacagggacctgaccaaccactacaagacctacgaggaaaagctgaacgacggctgcgagttcctgaccagcacagagcaacctctgagcggcatgatcaacaactactacacagtggccctgcggaacatgaacgagagatacggctacaagacagaggacctggccttcatccaggacaagcggttcaagttcgtgaaggacgcctacggcaagaaaaagtcccaagtgaataccggattcttcctgagcctgcaggactacaacggcgacacacagaagaagctgcacctgagcggagtgggaatcgccctgctgatctgcctgttcctggacaagcagtacatcaacatctttctgagcaggctgcccatcttctccagctacaatgcccagagcgaggaacggcggatcatcatcagatccttcggcatcaacagcatcaagctgcccaaggaccggatccacagcgagaagtccaacaagagcgtggccatggatatgctcaacgaagtgaagcggtgccccgacgagctgttcacaacactgtctgccgagaagcagtcccggttcagaatcatcagcgacgaccacaatgaagtgctgatgaagcggagcagcgacagattcgtgcctctgctgctgcagtatatcgattacggcaagctgttcgaccacatcaggttccacgtgaacatgggcaagctgagatacctgctgaaggccgacaagacctgcatcgacggccagaccagagtcagagtgatcgagcagcccctgaacggcttcggcagactggaagaggccgagacaatgcggaagcaagagaacggcaccttcggcaacagcggcatccggatcagagacttcgagaacatgaagcgggacgacgccaatcctgccaactatccctacatcgtggacacctacacacactacatcctggaaaacaacaaggtcgagatgtttatcaacgacaaagaggacagcgccccactgctgcccgtgatcgaggatgatagatacgtggtcaagacaatccccagctgccggatgagcaccctggaaattccagccatggccttccacatgtttctgttcggcagcaagaaaaccgagaagctgatcgtggacgtgcacaaccggtacaagagactgttccaggccatgcagaaagaagaagtgaccgccgagaatatcgccagcttcggaatcgccgagagcgacctgcctcagaagatcctggatctgatcagcggcaatgcccacggcaaggatgtggacgccttcatcagactgaccgtggacgacatgctgaccgacaccgagcggagaatcaagagattcaaggacgaccggaagtccattcggagcgccgacaacaagatgggaaagagaggcttcaagcagatctccacaggcaagctggccgacttcctggccaaggacatcgtgctgtttcagcccagcgtgaacgatggcgagaacaagatcaccggcctgaactaccggatcatgcagagcgccattgccgtgtacgatagcggcgacgattacgaggccaagcagcagttcaagctgatgttcgagaaggcccggctgatcggcaagggcacaacagagcctcatccatttctgtacaaggtgttcgcccgcagcatccccgccaatgccgtcgagttctacgagcgctacctgatcgagcggaagttctacctgaccggcctgtccaacgagatcaagaaaggcaacagagtggatgtgcccttcatccggcgggaccagaacaagtggaaaacacccgccatgaagaccctgggcagaatctacagcgaggatctgcccgtggaactgcccagacagatgttcgacaatgagatcaagtcccacctgaagtccctgccacagatggaaggcatcgacttcaacaatgccaacgtgacctatctgatcgccgagtacatgaagagagtgctggacgacgacttccagaccttctaccagtggaaccgcaactaccggtacatggacatgcttaagggcgagtacgacagaaagggctccctgcagcactgcttcaccagcgtggaagagagagaaggcctctggaaagagcgggcctccagaacagagcggtacagaaagcaggccagcaacaagatccgcagcaaccggcagatgagaaacgccagcagcgaagagatcgagacaatcctggataagcggctgagcaacagccggaacgagtaccagaaaagcgagaaagtgatccggcgctacagagtgcaggatgccctgctgtttctgctggccaaaaagaccctgaccgaactggccgatttcgacggcgagaggttcaaactgaaagaaatcatgcccgacgccgagaagggaatcctgagcgagatcatgcccatgagcttcaccttcgagaaaggcggcaagaagtacaccatcaccagcgagggcatgaagctgaagaactacggcgacttctttgtgctggctagcgacaagaggatcggcaacctgctggaactcgtgggcagcgacatcgtgtccaaagaggattagtaa

SEQ ID NO: 290 - DNA, 3045 bp, Artificial Sequence
  chemically synthesized
atggactacaaagaccatgacggtgattataaagatcatgacatcgattacaaggatgacgatgacaagggcggatccaaattataaggaggcaacatccccgctctggtggaaaaccagaagaagtactttggcacctacagcgtgatggccatgctgaacgctcagaccgtgctggaccacatccagaaggtggccgatattgagggcgagcagaacgagaacaacgagaatctgtggtttcaccccgtgatgagccacctgtacaacgccaagaacggctacgacaagcagcccgagaaaaccatgttcatcatcgagcggctgcagagctacttcccattcctgaagatcatggccgagaaccagagagagtacagcaacggcaagtacaagcagaaccgcgtggaagtgaacagcaacgacatcttcgaggtgctgaagcgcgccttcggcgtgctgaagatgtacagggacctgaccaaccactacaagacctacgaggaaaagctgaacgacggctgcgagttcctgaccagcacagagcaacctctgagcggcatgatcaacaactactacacagtggccctgcggaacatgaacgagagatacggctacaagacagaggacctggccttcatccaggacaagcggttcaagttcgtgaaggacgcctacggcaagaaaaagtcccaagtgaataccggattcttcctgagcctgcaggactacaacggcgacacacagaagaagctgcacctgagcggagtgggaatcgccctgctgatctgcctgttcctggacaagcagtacatcaacatctttctgagcaggctgcccatcttctccagctacaatgcccagagcgaggaacggcggatcatcatcagatccttcggcatcaacagcatcaagctgcccaaggaccggatccacagcgagaagtccaacaagagcgtggccatggatatgctcaacgaagtgaagcggtgccccgacgagctgttcacaacactgtctgccgagaagcagtcccggttcagaatcatcagcgacgaccacaatgaagtgctgatgaagcggagcagcgacagattcgtgcctctgctgctgcagtatatcgattacggcaagctgttcgaccacatcaggttccacgtgaacatgggcaagctgagatacctgctgaaggccgacaagacctgcatcgacggccagaccagagtcagagtgatcgagcagcccctgaacggcttcggcagactggaagaggccgagacaatgcggaagcaagagaacggcaccttcggcaacagcggcatccggatcagagacttcgagaacatgaagcgggacgacgccaatcctgccaactatccctacatcgtggacacctacacacactacatcctggaaaacaacaaggtcgagatgtttatcaacgacaaagaggacagcgccccactgctgcccgtgatcgaggatgatagatacgtggtcaagacaatccccagctgccggatgagcaccctggaaattccagccatggccttccacatgtttctgttcggcagcaagaaaaccgagaagctgatcgtggacgtgcacaaccggtacaagagactgttccaggccatgcagaaagaagaagtgaccgccgagaatatcgccagcttcggaatcgccgagagcgacctgcctcagaagatcctggatctgatcagcggcaatgcccacggcaaggatgtggacgccttcatcagactgaccgtggacgacatgctgaccgacaccgagcggagaatcaagagattcaaggacgaccggaagtccattcggagcgccgacaacaagatgggaaagagaggcttcaagcagatctccacaggcaagctggccgacttcctggccaaggacatcgtgctgtttcagcccagcgtgaacgatggcgagaacaagatcaccggcctgaactaccggatcatgcagagcgccattgccgtgtacgatagcggcgacgattacgaggccaagcagcagttcaagctgatgttcgagaaggcccggctgatcggcaagggcacaacagagcctcatccatttctgtacaaggtgttcgcccgcagcatccccgccaatgccgtcgagttctacgagcgctacctgatcgagcggaagttctacctgaccggcctgtccaacgagatcaagaaaggcaacagagtggatgtgcccttcatccggcgggaccagaacaagtggaaaacacccgccatgaagaccctgggcagaatctacagcgaggatctgcccgtggaactgcccagacagatgttcgacaatgagatcaagtcccacctgaagtccctgccacagatggaaggcatcgacttcaacaatgccaacgtgacctatctgatcgccgagtacatgaagagagtgctggacgacgacttccagaccttctaccagtggaaccgcaactaccggtacatggacatgcttaagggcgagtacgacagaaagggctccctgcagcactgcttcaccagcgtggaagagagagaaggcctctggaaagagcgggcctccagaacagagcggtacagaaagcaggccagcaacaagatccgcagcaaccggcagatgagaaacgccagcagcgaagagatcgagacaatcctggataagcggctgagcaacagccggaacgagtaccagaaaagcgagaaagtgatccggcgctacagagtgcaggatgccctgctgtttctgctggccaaaaagaccctgaccgaactggccgatttcgacggcgagaggttcaaactgaaagaaatcatgcccgacgccgagaagggaatcctgagcgagatcatgcccatgagcttcaccttcgagaaaggcggcaagaagtacaccatcaccagcgagggcatgaagctgaagaactacggcgacttctttgtgctggctagcgacaagaggatcggcaacctgctggaactcgtgggcagcgacatcgtgtccaaagaggattagtaa

SEQ ID NO: 291 - DNA, 34 bp, Artificial Sequence
  chemically synthesized
gttggaactgctcattttggagggtaatcacaac

SEQ ID NO: 292 - DNA, 36 bp, Artificial Sequence
  chemically synthesized
gttgcatctgccttctttttgaaaggtaaaaacaac

SEQ ID NO: 293 - DNA, 36 bp, Artificial Sequence
  chemically synthesized
gttgtggaaggtccagttttgaggggctattacaac

SEQ ID NO: 294 - DNA, 36 bp, Artificial Sequence
  chemically synthesized
gttgtggaaggtccagctttgaggggctattacaac

SEQ ID NO: 295 - DNA, 36 bp, Artificial Sequence
  chemically synthesized
gttgtggaaggtccagatttgaggggctattacaac

SEQ ID NO: 296 - DNA, 36 bp, Artificial Sequence
  chemically synthesized
gttgtggaaggtccaggtttgaggggctattacaac

SEQ ID NO: 297 - DNA, 36 bp, Artificial Sequence
  chemically synthesized
gttgtggaaggtccagtcttgaggggctattacaac

SEQ ID NO: 298 - DNA, 36 bp, Artificial Sequence
  chemically synthesized
gttgtggaaggtccagtattgaggggctattacaac

SEQ ID NO: 299 - DNA, 36 bp, Artificial Sequence
  chemically synthesized
gttgtggaaggtccagtgttgaggggctattacaac

SEQ ID NO: 300 - DNA, 36 bp, Artificial Sequence
  chemically synthesized
gttgtggaaggtccagttctgaggggctattacaac

SEQ ID NO: 301 - DNA, 30 bp, Artificial Sequence
  chemically synthesized
gcagcagcagcagcagcagcagcagcagca

SEQ ID NO: 302 - DNA, 31 bp, Artificial Sequence
  chemically synthesized
gagcagcagcagcagcagcagcagcagcagc

SEQ ID NO: 303 - DNA, 31 bp, Artificial Sequence
  chemically synthesized
gcagcagcagcagcagcagcagcagcagcag

SEQ ID NO: 304 - DNA, 59 bp, Artificial Sequence
  chemically synthesized
cugcugcugcugcugcugcugcugcugcugcugcugcugcugcugcugcugcugaaaaa

SEQ ID NO: 305 - DNA, 38 bp, Artificial Sequence
  chemically synthesized
cugcugcugcugcugcugcugcugcugcugcugcugcu

SEQ ID NO: 306 - DNA, 51 bp, Artificial Sequence
  chemically synthesized
cugcugcugcugcugcugcugcugcugcugcugcugcugcugcugcugcug

SEQ ID NO: 307 - DNA, 79 bp, Artificial Sequence
  chemically synthesized
ttaaaggtttataccttcccaggtaacaaaccaaccaactttcgatctcttgtagatctgttctctaaacgaactttaa

SEQ ID NO: 308 - DNA, 30 bp, Artificial Sequence
  chemically synthesized
aaaggtttataccttcccaggtaacaaacc

SEQ ID NO: 309 - DNA, 30 bp, Artificial Sequence
  chemically synthesized
gtttataccttcccaggtaacaaaccaacc

SEQ ID NO: 310 - DNA, 30 bp, Artificial Sequence
  chemically synthesized
ccttcccaggtaacaaaccaaccaactttc

SEQ ID NO: 311 - DNA, 30 bp, Artificial Sequence
  chemically synthesized
caggtaacaaaccaaccaactttcgatctc

SEQ ID NO: 312 - DNA, 30 bp, Artificial Sequence
  chemically synthesized
aaccaaccaactttcgatctcttgtagatc

SEQ ID NO: 313 - DNA, 30 bp, Artificial Sequence
  chemically synthesized
caactttcgatctcttgtagatctgttctc

SEQ ID NO: 314 - DNA, 30 bp, Artificial Sequence
  chemically synthesized
ttcgatctcttgtagatctgttctctaaac

SEQ ID NO: 315 - DNA, 81 bp, Artificial Sequence
  chemically synthesized
gtaacattagggaggacttgaaagagccaccacattttcaccaggccacgcggagtacgatcgagtgtacagtgaacaatg

SEQ ID NO: 316 - DNA, 30 bp, Artificial Sequence
  chemically synthesized
acattagggaggacttgaaagagccaccac

SEQ ID NO: 317 - DNA, 30 bp, Artificial Sequence
  chemically synthesized
gggaggacttgaaagagccaccacattttc

SEQ ID NO: 318 - DNA, 29 bp, Artificial Sequence
  chemically synthesized
ttgaaagagccaccacattttcaccaggc

SEQ ID NO: 319 - DNA, 29 bp, Artificial Sequence
  chemically synthesized
agagccaccacattttcaccaggccacgc

SEQ ID NO: 320 - DNA, 29 bp, Artificial Sequence
  chemically synthesized
attttcaccaggccacgcggagtacgatc

SEQ ID NO: 321 - DNA, 30 bp, Artificial Sequence
  chemically synthesized
acgcggagtacgatcgagtgtacagtgaac

SEQ ID NO: 322 - DNA, 79 bp, Artificial Sequence
  chemically synthesized
gattgcgagcgatttgcgtgcgtgcatcccgcttcactgatctcttgttagatcttttcataatctaaactttataaaa

SEQ ID NO: 323 - DNA, 79 bp, Artificial Sequence
  chemically synthesized
acattagggaggacttgaaagagccaccacattttcaccgaggccacgcggagtacgatcgagtgtacagtgaacaatg

SEQ ID NO: 324 - DNA, 40 bp, Artificial Sequence
  chemically synthesized
atcgtgctacaacttcctcaaggaacaacattgccaaaag

SEQ ID NO: 325 - DNA, 36 bp, Artificial Sequence
  chemically synthesized
cgcgcattggcatggaagtcacaccttcgggaacgt

SEQ ID NO: 326 - DNA, 30 bp, Artificial Sequence
  chemically synthesized
gctacaacttcctcaaggaacaacattgcc

SEQ ID NO: 327 - DNA, 30 bp, Artificial Sequence
  chemically synthesized
cattggcatggaagtcacaccttcgggaac

SEQ ID NO: 328 - DNA, 60 bp, Artificial Sequence
  chemically synthesized
gtgttggtaatgaaacgaaaacgggactctagcatacttactgacagccagacagcgacc

SEQ ID NO: 329 - DNA, 60 bp, Artificial Sequence; identical to SEQ ID NO: 328
  chemically synthesized

SEQ ID NO: 330 - DNA, 60 bp, Artificial Sequence
  chemically synthesized
gtgttggtgatgaaacggaaacgggactctagcatacttactgacagtcagacagcgacc

SEQ ID NO: 331 - DNA, 60 bp, Artificial Sequence; identical to SEQ ID NO: 328
  chemically synthesized

SEQ ID NO: 332 - DNA, 60 bp, Artificial Sequence
  chemically synthesized
ggacggatcaagaaagaagagttctctgagatcatgaagatctgttccaccattgaagaa

SEQ ID NO: 333 - DNA, 60 bp, Artificial Sequence
  chemically synthesized
ggacggattaagaaggaagagttctctgagatcatgaagatctgttccaccattgaagaa

SEQ ID NO: 334 - DNA, 60 bp, Artificial Sequence
  chemically synthesized
ggaaggattaagaaagaagagtttgctgagatcatgaagatctgttccaccattgaagag

SEQ ID NO: 335 - DNA, 60 bp, Artificial Sequence
  chemically synthesized
ggacggattaagaaagaggagttcgctgagatcatgaagatctgttccaccattgaagag

SEQ ID NO: 336 - DNA, 61 bp, Artificial Sequence
  chemically synthesized
aatcgaggagtgcctgattaatgatccctgggttttgcttaatgcatcttggttcaactcc

SEQ ID NO: 337 - DNA, 61 bp, Artificial Sequence
  chemically synthesized
aattgaggagtgcctgattaatgatccctgggttttgctcaatgcatcttggttcaactcc

SEQ ID NO: 338 - DNA, 61 bp, Artificial Sequence; identical to SEQ ID NO: 336
  chemically synthesized

SEQ ID NO: 339 - DNA, 61 bp, Artificial Sequence
  chemically synthesized
aattgaggagtgcctgattaatgatccctgggttttgcttaatgcgtcttggttcaactcc

SEQ ID NO: 340 - DNA, 60 bp, Artificial Sequence
  chemically synthesized
ttgacatgagtaatgaagggtcttatttcttcggagacaatgcagaggagtatgacagtt

SEQ ID NO: 341 - DNA, 60 bp, Artificial Sequence
  chemically synthesized
ttgatatgagtaatgaaggatcttatttcttcggagacaatgcagaagagtacgacaatt

SEQ ID NO: 342 - DNA, 60 bp, Artificial Sequence
  chemically synthesized
ttgacatgaataatgaaggatcttatttcttcggagacaatgcagaggagtatgacaatt

SEQ ID NO: 343 - DNA, 60 bp, Artificial Sequence
  chemically synthesized
ttgacatgagtaatgaaggatcttatttcttcggagacaatgcagaggagtacgacaatt

SEQ ID NO: 344 - DNA, 60 bp, Artificial Sequence
  chemically synthesized
ttctatcatcccgtcaggccccctcaaagccgagatcgcgcagagactggaaagtgtctt

SEQ ID NO: 345 - DNA, 60 bp, Artificial Sequence
  chemically synthesized
ctctatcgttccatcaggccccctcaaagccgagatcgcgcagagacttgaagatgtctt

SEQ ID NO: 346 - DNA, 60 bp, Artificial Sequence
  chemically synthesized
ctctatcattccatcaggccccctcaaagccgagatcgcacagagacttgaggatgtttt

SEQ ID NO: 347 - DNA, 60 bp, Artificial Sequence
  chemically synthesized
ctctatcgtcccgtcaggccccctcaaagccgagatcgcacagagacttgaagatgtctt

SEQ ID NO: 348 - DNA, 65 bp, Artificial Sequence
  chemically synthesized
gcagcagcagcagcagcagcagcagcagcauuguggaagguccaguuuugaggggcuauuacaac

SEQ ID NO: 349 - DNA, 28 bp, Artificial Sequence
  chemically synthesized
gcagcagcagcagcagcagcagcagcag

SEQ ID NO: 350 - DNA, 28 bp, Artificial Sequence
  chemically synthesized
cagcagcagcagcagcagcagcagcagc

SEQ ID NO: 351 - DNA, 28 bp, Artificial Sequence
  chemically synthesized
agcagcagcagcagcagcagcagcagca

SEQ ID NO: 352 - DNA, 22 bp, Artificial Sequence
  chemically synthesized
gcagcagcagcagcagcagcag

SEQ ID NO: 353 - DNA, 22 bp, Artificial Sequence
  chemically synthesized
cagcagcagcagcagcagcagc

SEQ ID NO: 354 - DNA, 22 bp, Artificial Sequence
  chemically synthesized
agcagcagcagcagcagcagca

SEQ ID NO: 355 - DNA, 110 bp, Artificial Sequence
  chemically synthesized
attaaaggtttataccttcccaggtaacaaaccaaccaactttcgatctcttgtagatctgttctctaaacgaactttaaaaaggtttataccttcccaggtaacaaacc

SEQ ID NO: 356 - DNA, 30 bp, Artificial Sequence
  chemically synthesized
tttccaaatatggaagggtccattgtttgg

SEQ ID NO: 357 - DNA, 30 bp, Artificial Sequence
  chemically synthesized
caaatatggaagggtccattgtttggttgg

SEQ ID NO: 358 - DNA, 30 bp, Artificial Sequence
  chemically synthesized
ggaagggtccattgtttggttggttgaaag

SEQ ID NO: 359 - DNA, 30 bp, Artificial Sequence
  chemically synthesized
gtccattgtttggttggttgaaagctagag

SEQ ID NO: 360 - DNA, 30 bp, Artificial Sequence
  chemically synthesized
ttggttggttgaaagctagagaacatctag

SEQ ID NO: 361 - DNA, 30 bp, Artificial Sequence
  chemically synthesized
gttgaaagctagagaacatctagacaagag

SEQ ID NO: 362 - DNA, 30 bp, Artificial Sequence
  chemically synthesized
aagctagagaacatctagacaagagatttg

SEQ ID NO: 363 - DNA, 30 bp, Artificial Sequence
  chemically synthesized
tgtaatccctcctgaactttctcggtggtg

SEQ ID NO: 364 - DNA, 30 bp, Artificial Sequence
  chemically synthesized
ccctcctgaactttctcggtggtgtaaaag

SEQ ID NO: 365 - DNA, 30 bp, Artificial Sequence
  chemically synthesized
aactttctcggtggtgtaaaagtggctccg

SEQ ID NO: 366 - DNA, 30 bp, Artificial Sequence
  chemically synthesized
tctcggtggtgtaaaagtggctccggtgcg

SEQ ID NO: 367 - DNA, 30 bp, Artificial Sequence
  chemically synthesized
taaaagtggctccggtgcgcctcatgctag

SEQ ID NO: 368 - DNA, 30 bp, Artificial Sequence
  chemically synthesized
tgcgcctcatgctagctcacatgtcacttg

SEQ ID NO: 369 - DNA, 30 bp, Artificial Sequence
  chemically synthesized
ggtttgttacctgggaaggtataaaccttt

SEQ ID NO: 370 - DNA, 30 bp, Artificial Sequence
  chemically synthesized
ggttggtttgttacctgggaaggtataaac

SEQ ID NO: 371 - DNA, 30 bp, Artificial Sequence
  chemically synthesized
gaaagttggttggtttgttacctgggaagg

SEQ ID NO: 372 - DNA, 30 bp, Artificial Sequence
  chemically synthesized
gagatcgaaagttggttggtttgttacctg

SEQ ID NO: 373 - DNA, 30 bp, Artificial Sequence
  chemically synthesized
gatctacaagagatcgaaagttggttggtt

SEQ ID NO: 374 - DNA, 30 bp, Artificial Sequence
  chemically synthesized
gagaacagatctacaagagatcgaaagttg

SEQ ID NO: 375 - DNA, 30 bp, Artificial Sequence
  chemically synthesized
gtttagagaacagatctacaagagatcgaa

SEQ ID NO: 376 - DNA, 30 bp, Artificial Sequence
  chemically synthesized
gcgggatgcacgcacgcaaatcgctcgcaa

SEQ ID NO: 377 - DNA, 30 bp, Artificial Sequence
  chemically synthesized
gtgaagcgggatgcacgcacgcaaatcgct

SEQ ID NO: 378 - DNA, 30 bp, Artificial Sequence
  chemically synthesized
gagatcagtgaagcgggatgcacgcacgca

SEQ ID NO: 379 - DNA, 30 bp, Artificial Sequence
  chemically synthesized
gatctaacaagagatcagtgaagcgggatg

SEQ ID NO: 380 - DNA, 30 bp, Artificial Sequence
  chemically synthesized
gaaaagatctaacaagagatcagtgaagcg

SEQ ID NO: 381 - DNA, 30 bp, Artificial Sequence
  chemically synthesized
gattatgaaaagatctaacaagagatcagt

SEQ ID NO: 382 - DNA, 30 bp, Artificial Sequence
  chemically synthesized
gtttagattatgaaaagatctaacaagaga

SEQ ID NO: 383 - DNA, 30 bp, Artificial Sequence
  chemically synthesized
gtggtggctctttcaagtcctccctaatgt

SEQ ID NO: 384 - DNA, 30 bp, Artificial Sequence
  chemically synthesized
gaaaatgtggtggctctttcaagtcctccc

SEQ ID NO: 385 - DNA, 30 bp, Artificial Sequence
  chemically synthesized
gcctcggtgaaaatgtggtggctctttcaa

SEQ ID NO: 386 - DNA, 30 bp, Artificial Sequence
  chemically synthesized
gcgtggcctcggtgaaaatgtggtggctct

SEQ ID NO: 387 - DNA, 30 bp, Artificial Sequence
  chemically synthesized
gatcgtactccgcgtggcctcggtgaaaat

SEQ ID NO: 388 - DNA, 30 bp, Artificial Sequence
  chemically synthesized
gtacactcgatcgtactccgcgtggcctcg

SEQ ID NO: 389 - DNA, 30 bp, Artificial Sequence
  chemically synthesized
gttcactgtacactcgatcgtactccgcgt

SEQ ID NO: 390 - DNA, 30 bp, Artificial Sequence
  chemically synthesized
ggcaatgttgttccttgaggaagttgtagc

SEQ ID NO: 391 - DNA, 30 bp, Artificial Sequence
  chemically synthesized
gttcccgaaggtgtgacttccatgccaatg

SEQ ID NO: 392 - DNA, 30 bp, Artificial Sequence
  chemically synthesized
gctgtcagtaagtatgctagagtcccgttt

SEQ ID NO: 393 - DNA, 30 bp, Artificial Sequence
  chemically synthesized
cttcaatggtggaacagatcttcatgatct

SEQ ID NO: 394 - DNA, 30 bp, Artificial Sequence
  chemically synthesized
gcaaaacccagggatcattaatcaggcact

SEQ ID NO: 395 - DNA, 30 bp, Artificial Sequence
  chemically synthesized
tctgcattgtctccgaagaaataagaccct

SEQ ID NO: 396 - DNA, 30 bp, Artificial Sequence
  chemically synthesized
ctgcgcgatctcggctttgagggggcctga

SEQ ID NO: 397 - DNA, 30 bp, Artificial Sequence
  chemically synthesized
aaacgggactctagcatacttactgacagc

SEQ ID NO: 398 - DNA, 30 bp, Artificial Sequence
  chemically synthesized
gagatcatgaagatctgttccaccattgaa

SEQ ID NO: 399 - DNA, 30 bp, Artificial Sequence
  chemically synthesized
gaggagtgcctgattaatgatccctgggtt

SEQ ID NO: 400 - DNA, 30 bp, Artificial Sequence
  chemically synthesized
aggatcttatttcttcggagacaatgcaga

SEQ ID NO: 401 - DNA, 30 bp, Artificial Sequence
  chemically synthesized
tcaggccccctcaaagccgagatcgcgcag

SEQ ID NO: 402 - DNA, 162 bp, Artificial Sequence
  chemically synthesized
gagatcgaaagttggttggtttgttacctggttgtggaaggtccagtcttgaggggctattacaacgttcccgaaggtgtgacttccatgccaatggttgtggaaggtccagctttgaggggctattacaacgcgtggcctcggtgaaaatgtggtggctct

SEQ ID NO: 403 - DNA, 294 bp, Artificial Sequence
  chemically synthesized
gctgtcagtaagtatgctagagtcccgtttgttgtggaaggtccagtcttgaggggctattacaaccttcaatggtggaacagatcttcatgatctgttgtggaaggtccagctttgaggggctattacaacgcaaaacccagggatcattaatcaggcactgttgtggaaggtccagtgttgaggggctattacaactctgcattgtctccgaagaaataagaccctgttgtggaaggtccaggtttgaggggctattacaacctgcgcgatctcggctttgagggggcctga

SEQ ID NO: 404 - DNA, 294 bp, Artificial Sequence
  chemically synthesized
gagatcatgaagatctgttccaccattgaagttgtggaaggtccagtcttgaggggctattacaacaaacgggactctagcatacttactgacagcgttgtggaaggtccagctttgaggggctattacaacgaggagtgcctgattaatgatccctgggttgttgtggaaggtccagtgttgaggggctattacaacaggatcttatttcttcggagacaatgcagagttgtggaaggtccaggtttgaggggctattacaactcaggccccctcaaagccgagatcgcgcag

SEQ ID NO: 405 - DNA, 11479 bp, Artificial Sequence
  chemically synthesized
gtcgacggatcgggagatctcccgatcccctatggtgcactctcagtacaatctgctctgatgccgcatagttaagccagtatctgctccctgcttgtgtgttggaggtcgctgagtagtgcgcgagaaaatttaagctacaacaaggcaaggcttgaccgacaattgcatgaagaatctgcttagggttaggcgttttgcgctgcttcgcgatgtacgggccagatatacgcgttgacattgattattgactagttattaatagtaatcaattacggggtcattagttcatagcccatattggagttccgcgttacataacttacggtaaatggcccgcctggctgaccgcccaacgacccccgcccattgacgtcaataatgacgtatgttcccatagtaacgccaatagggactttccattgacgtcaatgggtggagtatttacggtaaactgcccacttggcagtacatcaagtgatcatatgccaagtacgccccctattgacgtcaatgacggtaaatggcccgcctggcattatgcccagtacatgaccttatgggactttcctacttggcagtacatctacgtattagtcatcgctattaccatggtgatgcggttttggcagtacatcaatgggcgtggatagcgtttgactcacggggatttccaagtctccaccccattgacgtcaatgggagtttgttttggcaccaaaatcaacgggactttccaaaatgtcgtaacaactccgccccattgacgcaaatgggcggtaggcgtgtacggtgggaggtctatataagcagcgcgttttgcctgtactggtctctctggttagaccagatctgagcctgggagctctctggctaactagggaacccactgcttaagcctcaataaagcttgccttgagtgcttcaagtagtgtgtgcccgtctgttgtgtgactctggtaactagagatccctcagacccttttagtcagtgtggaaaatctctagagtggcgcccgaacagggacttgaaagcgaaagggaaaccagaggagctctctcgacgcaggactcggcttgctgaagcgcgcacggcaagaggcgaggggcggcgactggtgagtacgccaaaaattttgactagcggaggctagaaggagagagatgggtgcgagagcgtagtattaagcgggggagaattagatcgcgatgggaaaaaattcggttaaggccagggggaaagaaaaaatataaattaaaacatatagtatgggcaagcagggagctagaacgattcgcagttaatcctggcctgttagaaacatcagaaggctgtagacaaatctgggacagctacaaccatcccttcagacaggatcagaagaacttagatcattatataatacagtagcaaccctctattgtgtgcatcaaaggatagagataaaagacaccaaggaagctttagacaagatagaggaagagcaaaacaaaagtaagaccaccgcacacaagcggccgctgatcttcagacctggaggaggagatatgagggacaattggagaagtgaattatataaatataaagtagtaaaaattgaaccattaggagtagcacccaccaaggcaaagagaagagtggtgcagagagaaaaaagagcagtgggaataggagcttgttccttgggttcttgggagcagcaggaagcactatgggcgcagcgtcaatgacgctgacggtacaggccagacaattattgtctggtatagtgcagcagcagaacaatttgctgagggctattgaggcgcaacagcatctgttgcaactcacagtctggggcataagcagctccaggcaagaatcctggctgtggaaagatacctaaaggatcaacagctcctggggatttggggttgctctggaaaactcatttgcaccactgctgtgccttggaatgctagttggagtaataaatctctggaacagatttggaatcacacgacctggatgggtgggacagagaaattaacaattacacaagcttaatacactccttaattgaagaatcgcaaaaccagcaagaaaagaatgaacaagaattattggaattagataaatgggcaagtttgtggaattggtttaacataacaaattggctgtggtatataaaattattcataatgatgtaggaggcttggtaggtttaagaatagtttttgctgtactttctatagtgaatagagttaggcagggatattcaccattatcgtttcagacccacctcccaaccccgaggggacccgacaggcccgaaggaatagaagaagaaggtggagagagagacagagacagatccattcgatagtgaacggatcggcactgcgtgcgccaattctgcagacaaatggcagtattcatccacaattttaaaagaaaaggggggattggggggtacagtgcaggggaaagaatagtagacataatagcaacagacatacaaactaaagaattacaaaaacaaattacaaaattcaaaattttcgggtttattacagggacagcagagatccagtttggttaattaaggtaccgagggcctatttcccatgattccttcatatttgcatatacgatacaaggctgttagagagataattagaattaatttgactgtaaacacaaagatattagtacaaatacgtgacgtagaaagtaataatttcttgggtagtttgcagttttaaaattatgttttaaaatggactatcatatgcttaccgtaacttgaaagtatttcgatttcttggctttatatatcttgtggaaaggacgaaacaccggagacgctgggaccgtctcagttgtggaaggtccagtttgaggggctattacaactttttttgaattcgctagctaggtcttgaaaggagtgggaattggctccggtgcccgtcagtgggcagagcgcacatcgcccacagtccccgagaagttggggggaggggtcggcaattgatccggtgcctgagaaggtggcgcggggtaaactgggaaagtgatgtcgtgtactggctccgcctttttcccgagggtgggggagaaccgtatataagtgcagtagtcgccgtgaacgttctttttcgcaacgggtttgccgccagaacacaggctcgagcgccaccatggactacaagaccatgacggtgattataaagatcatgacatcgattacaaggatgacgatgacaagggatcccttcaactgcctccacttgaaagactgacactgggtagttccaacatccccgctctggtggaaaaccagaagaagtactttggcacctacagcgtgatggccatgctgaacgctcagaccgtgctggaccacatccagaaggtggccgatattgagggcgagcagaacgagaacaacgagaatctgtggtttcaccccgtgatgagccacctgtacaacgccaagaacggctacgacaagcagcccgagaaaaccatgttcatcatcgagcggctgcagagctacttcccattcctgaagatcatggccgagaaccagagagagtacagcaacggcaagtacaagcagaaccgcgtggaagtgaacagcaacgacatcttcgaggtgctgaagcgcgccttcggcgtgctgaagatgtacagggacctgaccaaccactacaagacctacgaggaaaagctgaacgacggctgcgagttcctgaccagcacagagcaacctctgagcggcatgatcaacaactactacacagtggccctgcggaacatgaacgagagatacggctacaagacagaggacctggccttcatccaggacaagcggttcaagttcgtgaaggacgcctacggcaagaaaaagtcccaagtgaataccggattcttcctgagcctgcaggactacaacggcgacacacagaagaagctgcacctgagcggagtgggaatcgccctgctgatctgcctgttcctggacaagcagtacatcaacatctttctgagcaggctgcccatcttctccagctacaatgcccagagcgaggaacggcggatcatcatcagatccttcggcatcaacagcatcaagctgcccaaggaccggatccacagcgagaagtccaacaagagcgtggccatggatatgctcaacgaagtgaagcggtgccccgacgagctgttcacaacactgtctgccgagaagcagtcccggttcagaatcatcagcgacgaccacaatgaagtgctgatgaagcggagcagcgacagattcgtgcctctgctgctgcagtatatcgattacggcaagctgttcgaccacatcaggttccacgtgaacatgggcaagctgagatacctgctgaaggccgacaagacctgcatcgacggccagaccagagtcagagtgatcgagcagcccctgaacggcttcggcagactggaagaggccgagacaatgcggaagcaagagaacggcaccttcggcaacagcggcatccggatcagagacttcgagaacatgaagcgggacgacgccaatcctgccaactatccctacatcgtggacacctacacacactacatcctggaaaacaacaaggtcgagatgtttatcaacgacaaagaggacagcgccccactgctgcccgtgatcgaggatgatagatacgtggtcaagacaatccccagctgccggatgagcaccctggaaattccagccatggccttccacatgtttctgttcggcagcaagaaaaccgagaagctgatcgtggacgtgcacaaccggtacaagagactgttccaggccatgcagaaagaagaagtgaccgccgagaatatcgccagcttcggaatcgccgagagcgacctgcctcagaagatcctggatctgatcagcggcaatgcccacggcaaggatgtggacgccttcatcagactgaccgtggacgacatgctgaccgacaccgagcggagaatcaagagattcaaggacgaccggaagtccattcggagcgccgacaacaagatgggaaagagaggcttcaagcagatctccacaggcaagctggccgacttcctggccaaggacatcgtgctgtttcagcccagcgtgaacgatggcgagaacaagatcaccggcctgaactaccggatcatgcagagcgccattgccgtgtacgatagcggcgacgattacgaggccaagcagcagttcaagctgatgttcgagaaggcccggctgatcggcaagggcacaacagagcctcatccatttctgtacaaggtgttcgcccgcagcatccccgccaatgccgtcgagttctacgagcgctacctgatcgagcggaagttctacctgaccggcctgtccaacgagatcaagaaaggcaacagagtggatgtgcccttcatccggcgggaccagaacaagtggaaaacacccgccatgaagaccctgggcagaatctacagcgaggatctgcccgtggaactgcccagacagatgttcgacaatgagatcaagtcccacctgaagtccctgccacagatggaaggcatcgacttcaacaatgccaacgtgacctatctgatcgccgagtacatgaagagagtgctggacgacgacttccagaccttctaccagtggaaccgcaactaccggtacatggacatgcttaagggcgagtacgacagaaagggctccctgcagcactgcttcaccagcgtggaagagagagaaggcctctggaaagagcgggcctccagaacagagcggtacagaaagcaggccagcaacaagatccgcagcaaccggcagatgagaaacgccagcagcgaagagatcgagacaatcctggataagcggctgagcaacagccggaacgagtaccagaaaagcgagaaagtgatccggcgctacagagtgcaggatgccctgctgtttctgctggccaaaaagaccctgaccgaactggccgatttcgacggcgagaggttcaaactgaaagaaatcatgcccgacgccgagaagggaatcctgagcgagatcatgcccatgagcttcaccttcgagaaaggcggcaagaagtacaccatcaccagcgagggcatgaagctgaagaactacggcgacttctttgtgctggctagcgacaagaggatcggcaacctgctggaactcgtgggcagcgacatcgtgtccaaagaggatatcatggaagagttcaacaaatacgaccagtgcaggcccgagatcagctccatcgtgttcaacctggaaaagtgggccttcgacacataccccgagctgtctgccagagtggaccgggaagagaaggtggacttcaagagcatcctgaaaatcctgctgaacaacaagaacatcaacaaagagcagagcgacatcctgcggaagatccggaacgccttcgatcacaacaattaccccgacaaaggcgtggtggaaatcaaggccctgcctgagatcgccatgagcatcaagaaggcctttggggagtacgccatcatgaagtagtaatctagaacgcgttaagtcgacaatcaacctctggattacaaaatttgtgaaagattgactggtattcttaactatgttgctccttttacgctatgtggatacgctgctttaatgcctttgtatcatgctattgcttcccgtatggctttcattttctcctccttgtataaatcctggttgctgtctctttatgaggagttgtggcccgttgtcaggcaacgtggcgtggtgtgcactgtgtttgctgacgcaacccccactggttggggcattgccaccacctgtcagctcctttccgggactttcgctttccccctccctattgccacggcggaactcatcgccgcctgccttgcccgctgctggacaggggctcggctgttgggcactgacaattccgtggtgttgtcggggaaatcatcgtcctttccttggctgctcgcctgtgttgccacctggattctgcgcgggacgtccttctgctacgtcccttcggccctcaatccagcggaccttccttcccgcggcctgctgccggctctgcggcctcttccgcgtcttcgccttcgccctcagacgagtcggatctccctttgggccgcctccccgcgtcgactttaagaccaatgacttacaaggcagctgtagatcttagccactttttaaaagaaaaggggggactggaagggctaattcactcccaacgaagacaagatctgctttttgcttgtactgggtctctctggttagaccagatctgagcctgggagctctctggctaactagggaacccactgcttaagcctcaataaagcttgccttgagtgcttcaagtagtgtgtgcccgtctgttgtgtgactctggtaactagagatccctcagacccttttagtcagtgtggaaaatctctagcagggcccgtttaaacccgctgatcagcctcgactgtgccttctagttgccagccatctgttgtttgcccctcccccgtgccttccttgaccctggaaggtgccctcccactgtcctttcctaataaaatgaggaaattgcatcgcattgtctgagtaggtgtcattctattctggggggtggggtggggcaggacagcaagggggaggattgggaagacaatagcaggcatgctggggatgcggtgggctctatggcttctgaggcggaagaaccagctggggctctagggggtatccccacgcgccctgtagcggcgcattaagcgcggcgggtgtggtggttacgcgcagcgtgaccgctacacttgccagcgccctagcgcccgctcctttcgctttcttcccttcctttctcgccacgttcgccggctttccccgcaagctctaaatcgggggctccctttagggttccgatttagtgctttacggcacctcgaccccaaaaaacttgattagggtgatggttcacgtagtgggccatcgccctgatagacggtttttcgccctttgacgttggagtccacgttctttaatagtggactcttgttccaaactggacaacactcaaccctatctcggtctattcttttgatttataagggattttgccgatttcggcctattggttaaaaaatgagctgatttaacaaaaatttaacgcgaattaattctgtggaatgtgtgtcagttagggtgtggaaagtccccaggctccccagcaggcagaagtatgcaaagatgcatctcaattagtcagcaaccaggtgtggaaagtccccaggctccccagcaggcagaagtatgcaaagcatgcatctcaattagtcagcaaccatagtcccgcccctaactccgcccatcccgcccctaactccgcccagttccgcccattctccgccccatggctgactattttttttatttatgcagaggccgaggccgcctctgcctctgagctattccagaagtagtgaggaggcttttttggaggcctaggcttttgcaaaaagctcccgggagcttgtatatccattttcggatctgatcagcacgtgttgacaattaatcatcggcatagtatatcggatagtataatacgacaaggtgaggaactaaaccatggccaagttgaccagtgccgttccggtgctcaccgcgcgcgacgtcgccggagcggtcgagttctggaccgaccggctcgggttctcccgggacttcgtggaggacgacttcgccggtgtggtccgggacgacgtgacccgttcatcagcgcggtccaggaccaggtggtgccggacaacaccctggcctgggtgtgggtgcgcggcctggacgagctgtacgccgagtggtcggaggtcgtgtccacgaacttccgggacgcctccgggccggccatgaccgagatcggcgagcagccgtgggggcggagttcgccctgcgcgacccggccggcaactgcgtgcacttcgtggccgaggagcaggactgacacgtgctacgagatttcgattccaccgccgccttctatgaaaggttgggcttcggaatcgttttccgggacgccggctggatgatcctccagcgcggggattcatgctggagttcttcgcccaccccaacttgtttattgcagcttataatggttacaaataaagcaatagcatcacaaatttcacaaataaagcatttttttcactgcattctagttgtggtttgtccaaactcatcaatgtatcttatcatgtctgtataccgtcgacctctagcagagcttggcgtaatcatggtcatagctgtttcctgtgtgaaattgttatccgctcacaattccacacaacatacgagccggaagcataaagtgtaaagcctggggtgcctaatgagtgagctaactcacattaattgcgttgcgctcactgcccgctttccagtcgggaaacctgtcgtgccactgcattaatgaatcggccaacgcgcggggagaggcggtttgcgtattgggcgctcttccgcttcctcgctcactgactcgctgcgctcggtcgttcggctgcggcgagcggtatcagctcactcaaaggcggtaatacggttatccacagaatcaggggataacgcaggaagaacatgtgagcaaaaggccagcaaaaggccaggaaccgtaaaaaggccgcgttgctggcgtttttccataggctccgcccccctgacgagcatcacaaaaatcgacgctcaagtcagaggtggcgaaacccgacaggactataaagataccaggcgtttccccctgaagctccctcgtgcgctctcctgttccgaccctgccgcttaccggatacctgtccgcctttctcccttcgggaagcgtggcgctttctcatagctcacgctgtaggtatctcagttcggtgtaggtcgttcgctccaagctgggctgtgtgcacgaaccccccgttcagccgaccgctgcgccttatccggtaactatcgtcttgagtccaacccggtaagacacgacttatcgccactggcagcagccactggtaacaggattagcagagcgaggtatgtaggcggtgctacagagttcttgaagtggtggcctaactacggctacactagaagaacagtatttggttctgcgctctgctgaagccagttaccttcggaaaaagagttggtagctcttgatccggcaaacaaaccaccgctggtagcggtggtttttttgtttgcaagcagcagattacgcgcagaaaaaaaggatctcaagaagatcctttgatcttttctacggggtctgacgctcatggaacgaaaactcacgttaagggattttggtcatgagattatcaaaaaggatcttcacctagatccttttaaattaaaaatgaagttttaaatcaatctaaagtatatatgagtaaacttggtctgacagttaccaatgcttaatcagtgaggcacctatctcagcgatctgtcatttcgttcatccatagttgcctgactccccgtcgtgtagataactacgatacgggagggcttaccatctggccccagtgctgcaatgataccgcgagacccacgctcaccggctccagatttatcagcaataaaccagccagccggaagggccgagcgcagaagtggtcctgcaactttaccgcctccatccagtctattaattgttgccgggaagctagagtaagtagttcgccagttaatagtttgcgcaacgttgttgccattgctacaggcatcgtggtgtcacgctcgtcgtttggtatggcttcattcagctccggttcccaacgatcaaggcgagttacatgacccccatgttgtgcaaaaaagcggttagctccttcggtcctccgatcgttgtcagaagtaagttggccgcagtgttatcactcatggttatggcagcactgcataattctcttactgtcatgccatccgtaagatgcttttctgtgactggtgagtactcaaccaagtcattctgagaatgtgtatgcggcgaccgagttgctcttgcccggcgtcaatacgggataataccgcgccacatagcagaactttaaaagtgctcatcattggaaaacgttcttcggggcgaaaactctcaaggatcttaccgctgttgagatccagttcgatgtaacccactcgtgcacccaactgatctcagcatcttttactttcaccagcgtttctgggtgagcaaaaacaggaaggcaaaatgccgcaaaaaagggaataagggcgacacggaaatgttgaatactcatactcttcctttttcaatattattgaagcatttatcagggttattgtctcatgagcggatacatatttgaatgatttagaaaaataaacaaataggggttccgcgcacatttccccgaaaagtgccacctgac

SEQ ID NO: 406 - DNA, 11560 bp, Artificial Sequence
  chemically synthesized
gtcgacggatcgggagatctcccgatcccctatggtgcactctcagtacaatctgctctgatgccgcatagttaagccagtatctgctccctgcttgtgtgttggaggtcgctgagtagtgcgcgagaaaatttaagctacaacaaggcaaggcttgaccgacaattgcatgaagaatctgcttagggttaggcgttttgcgctgcttcgcgatgtacgggccagatatacgcgttgacattgattattgactagttattaatagtaatcaattacggggtcattagttcatagcccatattggagttccgcgttacataacttacggtaaatggcccgcctggctgaccgcccaacgacccccgcccattgacgtcaataatgacgtatgttcccatagtaacgccaatagggactttccattgacgtcaatgggtggagtatttacggtaaactgcccacttggcagtacatcaagtgatcatatgccaagtacgccccctattgacgtcaatgacggtaaatggcccgcctggcattatgcccagtacatgaccttatgggactttcctacttggcagtacatctacgtattagtcatcgctattaccatggtgatgcggttttggcagtacatcaatgggcgtggatagcgtttgactcacggggatttccaagtctccaccccattgacgtcaatgggagtttgttttggcaccaaaatcaacgggactttccaaaatgtcgtaacaactccgccccattgacgcaaatgggcggtaggcgtgtacggtgggaggtctatataagcagcgcgttttgcctgtactggtctctctggttagaccagatctgagcctgggagctctctggctaactagggaacccactgcttaagcctcaataaagcttgccttgagtgcttcaagtagtgtgtgcccgtctgttgtgtgactctggtaactagagatccctcagacccttttagtcagtgtggaaaatctctagagtggcgcccgaacagggacttgaaagcgaaagggaaaccagaggagctctctcgacgcaggactcggcttgctgaagcgcgcacggcaagaggcgaggggcggcgactggtgagtacgccaaaaattttgactagcggaggctagaaggagagagatgggtgcgagagcgtagtattaagcgggggagaattagatcgcgatgggaaaaaattcggttaaggccagggggaaagaaaaaatataaattaaaacatatagtatgggcaagcagggagctagaacgattcgcagttaatcctggcctgttagaaacatcagaaggctgtagacaaatctgggacagctacaaccatcccttcagacaggatcagaagaacttagatcattatataatacagtagcaaccctctattgtgtgcatcaaaggatagagataaaagacaccaaggaagctttagacaagatagaggaagagcaaaacaaaagtaagaccaccgcacacaagcggccgctgatcttcagacctggaggaggagatatgagggacaattggagaagtgaattatataaatataaagtagtaaaaattgaaccattaggagtagcacccaccaaggcaaagagaagagtggtgcagagagaaaaaagagcagtgggaataggagcttgttccttgggttcttgggagcagcaggaagcactatgggcgcagcgtcaatgacgctgacggtacaggccagacaattattgtctggtatagtgcagcagcagaacaatttgctgagggctattgaggcgcaacagcatctgttgcaactcacagtctggggcataagcagctccaggcaagaatcctggctgtggaaagatacctaaaggatcaacagctcctggggatttggggttgctctggaaaactcatttgcaccactgctgtgccttggaatgctagttggagtaataaatctctggaacagatttggaatcacacgacctggatgggtgggacagagaaattaacaattacacaagcttaatacactccttaattgaagaatcgcaaaaccagcaagaaaagaatgaacaagaattattggaattagataaatgggcaagtttgtggaattggtttaacataacaaattggctgtggtatataaaattattcataatgatgtaggaggcttggtaggtttaagaatagtttttgctgtactttctatagtgaatagagttaggcagggatattcaccattatcgtttcagacccacctcccaaccccgaggggacccgacaggcccgaaggaatagaagaagaaggtggagagagagacagagacagatccattcgatagtgaacggatcggcactgcgtgcgccaattctgcagacaaatggcagtattcatccacaattttaaaagaaaaggggggattggggggtacagtgcaggggaaagaatagtagacataatagcaacagacatacaaactaaagaattacaaaaacaaattacaaaattcaaaattttcgggtttattacagggacagcagagatccagtttggttaattaaggtaccgagggcctatttcccatgattccttcatatttgcatatacgatacaaggctgttagagagataattagaattaatttgactgtaaacacaaagatattagtacaaatacgtgacgtagaaagtaataatttcttgggtagtttgcagttttaaaattatgttttaaaatggactatcatatgcttaccgtaacttgaaagtatttcgatttcttggctttatatatcttgtggaaaggacgaaacaccggagacgctgggaccgtctcagttgtggaaggtccagtttgaggggctattacaactttttttgaattcgctagctaggtcttgaaaggagtgggaattggctccggtgcccgtcagtgggcagagcgcacatcgcccacagtccccgagaagttggggggaggggtcggcaattgatccggtgcctgagaaggtggcgcggggtaaactgggaaagtgatgtcgtgtactggctccgcctttttcccgagggtgggggagaaccgtatataagtgcagtagtcgccgtgaacgttctttttcgcaacgggtttgccgccagaacacaggctcgagcgccaccatggactacaagaccatgacggtgattataaagatcatgacatcgattacaaggatgacgatgacaagggcggaaactcaaagaaaaggtcactggaggacaacgaaacggaaatcaaagtctccagagacacctggaacactaagaacatgcggtccctggaaccgccacgaagcaagaaacggatacatggaggcaacatccccgctctggtggaaaaccagaagaagtactttggcacctacagcgtgatggccatgctgaacgctcagaccgtgctggaccacatccagaaggtggccgatattgagggcgagcagaacgagaacaacgagaatctgtggtttcaccccgtgatgagccacctgtacaacgccaagaacggctacgacaagcagcccgagaaaaccatgttcatcatcgagcggctgcagagctacttcccattcctgaagatcatggccgagaaccagagagagtacagcaacggcaagtacaagcagaaccgcgtggaagtgaacagcaacgacatcttcgaggtgctgaagcgcgccttcggcgtgctgaagatgtacagggacctgaccaaccactacaagacctacgaggaaaagctgaacgacggctgcgagttcctgaccagcacagagcaacctctgagcggcatgatcaacaactactacacagtggccctgcggaacatgaacgagagatacggctacaagacagaggacctggccttcatccaggacaagcggttcaagttcgtgaaggacgcctacggcaagaaaaagtcccaagtgaataccggattcttcctgagcctgcaggactacaacggcgacacacagaagaagctgcacctgagcggagtgggaatcgccctgctgatctgcctgttcctggacaagcagtacatcaacatctttctgagcaggctgcccatcttctccagctacaatgcccagagcgaggaacggcggatcatcatcagatccttcggcatcaacagcatcaagctgcccaaggaccggatccacagcgagaagtccaacaagagcgtggccatggatatgctcaacgaagtgaagcggtgccccgacgagctgttcacaacactgtctgccgagaagcagtcccggttcagaatcatcagcgacgaccacaatgaagtgctgatgaagcggagcagcgacagattcgtgcctctgctgctgcagtatatcgattacggcaagctgttcgaccacatcaggttccacgtgaacatgggcaagctgagatacctgctgaaggccgacaagacctgcatcgacggccagaccagagtcagagtgatcgagcagcccctgaacggcttcggcagactggaagaggccgagacaatgcggaagcaagagaacggcaccttcggcaacagcggcatccggatcagagacttcgagaacatgaagcgggacgacgccaatcctgccaactatccctacatcgtggacacctacacacactacatcctggaaaacaacaaggtcgagatgtttatcaacgacaaagaggacagcgccccactgctgcccgtgatcgaggatgatagatacgtggtcaagacaatccccagctgccggatgagcaccctggaaattccagccatggccttccacatgtttctgttcggcagcaagaaaaccgagaagctgatcgtggacgtgcacaaccggtacaagagactgttccaggccatgcagaaagaagaagtgaccgccgagaatatcgccagcttcggaatcgccgagagcgacctgcctcagaagatcctggatctgatcagcggcaatgcccacggcaaggatgtggacgccttcatcagactgaccgtggacgacatgctgaccgacaccgagcggagaatcaagagattcaaggacgaccggaagtccattcggagcgccgacaacaagatgggaaagagaggcttcaagcagatctccacaggcaagctggccgacttcctggccaaggacatcgtgctgtttcagcccagcgtgaacgatggcgagaacaagatcaccggcctgaactaccggatcatgcagagcgccattgccgtgtacgatagcggcgacgattacgaggccaagcagcagttcaagctgatgttcgagaaggcccggctgatcggcaagggcacaacagagcctcatccatttctgtacaaggtgttcgcccgcagcatccccgccaatgccgtcgagttctacgagcgctacctgatcgagcggaagttctacctgaccggcctgtccaacgagatcaagaaaggcaacagagtggatgtgcccttcatccggcgggaccagaacaagtggaaaacacccgccatgaagaccctgggcagaatctacagcgaggatctgcccgtggaactgcccagacagatgttcgacaatgagatcaagtcccacctgaagtccctgccacagatggaaggcatcgacttcaacaatgccaacgtgacctatctgatcgccgagtacatgaagagagtgctggacgacgacttccagaccttctaccagtggaaccgcaactaccggtacatggacatgcttaagggcgagtacgacagaaagggctccctgcagcactgcttcaccagcgtggaagagagagaaggcctctggaaagagcgggcctccagaacagagcggtacagaaagcaggccagcaacaagatccgcagcaaccggcagatgagaaacgccagcagcgaagagatcgagacaatcctggataagcggctgagcaacagccggaacgagtaccagaaaagcgagaaagtgatccggcgctacagagtgcaggatgccctgctgtttctgctggccaaaaagaccctgaccgaactggccgatttcgacggcgagaggttcaaactgaaagaaatcatgcccgacgccgagaagggaatcctgagcgagatcatgcccatgagcttcaccttcgagaaaggcggcaagaagtacaccatcaccagcgagggcatgaagctgaagaactacggcgacttctttgtgctggctagcgacaagaggatcggcaacctgctggaactcgtgggcagcgacatcgtgtccaaagaggatatcatggaagagttcaacaaatacgaccagtgcaggcccgagatcagctccatcgtgttcaacctggaaaagtgggccttcgacacataccccgagctgtctgccagagtggaccgggaagagaaggtggacttcaagagcatcctgaaaatcctgctgaacaacaagaacatcaacaaagagcagagcgacatcctgcggaagatccggaacgccttcgatcacaacaattaccccgacaaaggcgtggtggaaatcaaggccctgcctgagatcgccatgagcatcaagaaggcctttggggagtacgccatcatgaagtagtaatctagaacgcgttaagtcgacaatcaacctctggattacaaaatttgtgaaagattgactggtattcttaactatgttgctccttttacgctatgtggatacgctgctttaatgcctttgtatcatgctattgcttcccgtatggctttcattttctcctccttgtataaatcctggttgctgtctctttatgaggagttgtggcccgttgtcaggcaacgtggcgtggtgtgcactgtgtttgctgacgcaacccccactggttggggcattgccaccacctgtcagctcctttccgggactttcgctttccccctccctattgccacggcggaactcatcgccgcctgccttgcccgctgctggacaggggctcggctgttgggcactgacaattccgtggtgttgtcggggaaatcatcgtcctttccttggctgctcgcctgtgttgccacctggattctgcgcgggacgtccttctgctacgtcccttcggccctcaatccagcggaccttccttcccgcggcctgctgccggctctgcggcctcttccgcgtcttcgccttcgccctcagacgagtcggatctccctttgggccgcctccccgcgtcgactttaagaccaatgacttacaaggcagctgtagatcttagccactttttaaaagaaaaggggggactggaagggctaattcactcccaacgaagacaagatctgctttttgcttgtactgggtctctctggttagaccagatctgagcctgggagctctctggctaactagggaacccactgcttaagcctcaataaagcttgccttgagtgcttcaagtagtgtgtgcccgtctgttgtgtgactctggtaactagagatccctcagacccttttagtcagtgtggaaaatctctagcagggcccgtttaaacccgctgatcagcctcgactgtgccttctagttgccagccatctgttgtttgcccctcccccgtgccttccttgaccctggaaggtgccactcccactgtcctttcctaataaaatgaggaaattgcatcgcatgtctgagtaggtgtcattctattctggggggtggggtggggcaggacagcaagggggaggattgggaagacaatagcaggcatgctggggatgcggtgggctctatggcttctgaggcggaaagaaccagctggggctctagggggtatccccacgcgccctgtagcggcgcattaacgcggcgggtgtggtggttacgcgcagcgtgaccgctacacttgccagcgccctagcgcccgctcctttcgctttcttcccttcctttctcgccacgttcgccggctttccccgtcaagctctaaatcgggggctccctttagggttccgatttagtgctttacggacctcgaccccaaaaaacttgattagggtgatggttcacgtagtgggccatcgccctgatagacggtttttcgccctttgacgttggagtccacgttctttaatagtggactcttgttccaaactggaacaacactcaaccctatctcggtctattcttttgatttataagggattttgcgatttcggcctattggttaaaaaatgagctgatttaacaaaaatttaacgcgaattaattctgtggaatgtgtgtcagttagggtgtggaaagtccccaggctccccagcaggcagaagtatgcaaagcatgcatctcaattagtcagcaaccaggtgtggaaagtccccaggctccccagcagcagaagtatgcaaagcatgcatctcaattagtcagcaaccatagtcccgcccctaactccgcccatcccgcccctaactccgcccagttccgcccattctccgccccatggctgactaattttttttatttatgcagaggccgaggccgcctctgcctctgagctattccgaagtagtgaggaggcttttttggaggcctaggcttttgcaaaaagctcccgggagcttgtatatccattttcggatctgatcagcacgtgttgacaattaatcatcggcatagtatatcggcatagtataatacgacaaggtgaggaactaaaccatggccaagttgaccagtgccgtccggtgctcaccgcgcgcgacgtcgccggagcggtcgagttctggaccgaccggctcgggttctcccgggacttcgtggaggacgacttcgccggtgtggtccgggacgacgtgaccctgttcatcagcgcggtccaggaccaggtggtgccggacaacaccctggcctggggtgggtgcgcggcctggacgagctgtacgccgagtggtcggaggtcgtgtccacgaacttccgggacgcctccgggccggccatgaccgagatcggcgagcagccgtgggggcgggagttcgccctgcgcgacccggccggcaactgcgtgcacttcgtggccgaggacaggactgacacgtgctacgagatttcgattccaccgccgccttctatgaaaggttgggcttcggaatcgttttccgggacgccggctggatgatcctccagcgcggggatctcatgctggagttcttcgcccaccccaacttgtttattgcagcttataatggttcaaataaagcaatagcatcacaaatttcacaaataaagcatttttttcactgcattctagttgtggtttgtccaaactcatcaatgtatcttatcatgtctgtataccgtcgacctctagctagagcttggcgtaatcatggtcatagctgtttcctgtgtgaaattgttatccgctcaaattccacacaacatacgagccggaagcataaagtgtaaagcctggggtgcctaatgagtgagctaactcacattaattgcgttgcgctcactgcccgctttccagtcgggaaacctgtcgtgccagctgcattaatgaatcggccaacgcgcggggagaggcggtttgcgtattgggcgtcttccgcttcctcgctcactgactcgctgcgctcggtcgttcggctgcggcgagcggtatcagctcactcaaaggcggtaatacggttatccacagaatcaggggataacgcaggaaagaacatgtgagcaaaaggccagcaaaaggccaggaaccgtaaaaaggccgcgttgctgcgtttttccataggctccgcccccctgacgagcatcacaaaaatcgacgctcaagtcagaggtggcgaaacccgacaggactataaagataccaggcgtttccccctggaagctccctcgtgcgctctcctgttccgaccctgccgcttaccggatacctgtcccctttctcccttcgggaagcgtggcgctttctcatagctcacgctgtaggtatctcagttcggtgtaggtcgttcgctccaagctgggctgtgtgcacgaaccccccgttcagcccgaccgctgcgccttatccggtaactatcgtcttgagtccaacccggtaagacacgactatcgccactggcagcagccactggtaacaggattagcagagcgaggtatgtaggcggtgctacagagttcttgaagtggtggcctaactacggctacactagaagaacagtatttggtatctgcgctctgctgaagccagttaccttcggaaaaagagttggtagctcttgaccggcaaacaaaccaccgctggtagcggtggtttttttgtttgcaagcagcagattacgcgcagaaaaaaaggatctcaagaagatcctttgatcttttctacggggtctgacgctcagtggaacgaaaactcacgttaagggattttggtcatgagattatcaaaaaggatcttccctagatccttttaaattaaaaatgaagttttaaatcaatctaaagtatatatgagtaaacttggtctgacagttaccaatgcttaatcagtgaggcacctatctcagcgatctgtctatttcgttcatccatagttgcctgactccccgtcgtgtagataactacgatacgggaggcttaccatctggccccagtgctgcaatgataccgcgagacccacgctcaccggctccagatttatcagcaataaaccagccagccggaagggccgagcgcagaagtggtcctgcaactttatccgcctccatccagtctattaattgttgccgggaagctagagtaagtagttcgcagttaatagtttgcgcaacgttgttgccattgctacaggcatcgtggtgtcacgctcgtcgtttggtatggcttcattcagctccggttcccaacgatcaaggcgagttacatgatcccccatgttgtgcaaaaaagcggttagctccttcggtcctccgatcgttgtcagaataagttggccgcagtgttatcactcatggttatggcagcactgcataattctcttactgtcatgccatccgtaagatgcttttctgtgactggtgagtactcaaccaagtcattctgagaatagtgtatgcggcgaccgagttgctcttgcccggcgtcaatacgggataataccgcgcacatagcagaactttaaaagtgctcatcattggaaaacgttcttcggggcgaaaactctcaaggatcttaccgctgttgagatccagttcgatgtaacccactcgtgcacccaactgatcttcagcatcttttactttcaccagcgtttctgggtgagcaaaaacaggaaggcaaatgccgcaaaaaagggaataagggcgacacggaaatgttgaatactcatactcttcctttttcaatattattgaagcatttatcagggttattgtctcatgagcggatacatatttgaatgtatttagaaaaataaacaaataggggttccgcgcacatttccccgaaaagtgcacctgac

SEQ ID NO: 407 - DNA, 12081 bp, Artificial Sequence
  chemically synthesized
gtcgacggatcgggagatctcccgatcccctatggtgcactctcagtacaatctgctctgatgccgcatagttaagccagtatctgctccctgcttgtgtgttggaggtcgctgagtagtgcgcgagcaaaatttaagctacaacaaggcaaggcttgaccgacaattgcatgaagaatctgcttagggttaggcgttttgcgctgcttcgcgatgtacgggccagatatacgcgttgacattgattattgactagttattaatagtaatcaattacggggtcattagttcatagcccatatatggagttccgcgttacataacttacggtaaatggcccgcctggctgaccgcccaacgacccccgcccattgacgtcaataatgacgtatgttcccatagtaacgccaatagggactttccattgacgtcaatgggtggagtatttacggtaaactgcccacttggcagtacatcaagtgtatcatatgccaagtacgccccctattgacgtcaatgacggtaaatggcccgcctggcattatgcccagtacatgaccttatgggactttcctacttggcagtacatctacgtattagtcatcgctattaccatggtgatgcggttttggcagtacatcaatgggcgtggatagcggtttgactcacggggatttccaagtctccaccccattgacgtcaatgggagtttgttttggcaccaaaatcaacgggactttccaaaatgtcgtaacaactccgccccattgacgcaaatgggcggtaggcgtgtacggtgggaggtctatataagcagcgcgttttgcctgtactgggtctctctggttagaccagatctgagcctgggagctctctggctaactagggaacccactgcttaagcctcaataaagcttgccttgagtgcttcaagtagtgtgtgcccgtctgttgtgtgactctggtaactagagatccctcagacccttttagtcagtgtggaaaatctctagcagtggcgcccgaacagggacttgaaagcgaaagggaaaccagaggagctctctcgacgcaggactcggcttgctgaagcgcgcacggcaagaggcgaggggcggcgactggtgagtacgccaaaaattttgactagcggaggctagaaggagagagatgggtgcgagagcgtcagtattaagcgggggagaattagatcgcgatgggaaaaaattcggttaaggccagggggaaagaaaaaatataaattaaaacatatagtatgggcaagcagggagctagaacgattcgcagttaatcctggcctgttagaaacatcagaaggctgtagacaaatactgggacagctacaaccatcccttcagacaggatcagaagaacttagatcattatataatacagtagcaaccctctattgtgtgcatcaaaggatagagataaaagacaccaaggaagctttagacaagatagaggaagagcaaaacaaaagtaagaccaccgcacagcaagcggccgctgatcttcagacctggaggaggagatatgagggacaattggagaagtgaattatataaatataaagtagtaaaaattgaaccattaggagtagcacccaccaaggcaaagagaagagtggtgcagagagaaaaaagagcagtgggaataggagctttgttccttgggttcttgggagcagcaggaagcactatgggcgcagcgtcaatgacgctgacggtacaggccagacaattattgtctggtatagtgcagcagcagaacaatttgctgagggctattgaggcgcaacagcatctgttgcaactcacagtctggggcatcaagcagctccaggcaagaatcctggctgtggaaagatacctaaaggatcaacagctcctggggatttggggttgctctggaaaactcatttgcaccactgctgtgccttggaatgctagttggagtaataaatctctggaacagatttggaatcacacgacctggatggagtgggacagagaaattaacaattacacaagcttaatacactccttaattgaagaatcgcaaaaccagcaagaaaagaatgaacaagaattattggaattagataaatgggcaagtttgtggaattggtttaacataacaaattggctgtggtatataaaattattcataatgatagtaggaggcttggtaggtttaagaatagtttttgctgtactttctatagtgaatagagttaggcagggatattcaccattatcgtttcagacccacctcccaaccccgaggggacccgacaggcccgaaggaatagaagaagaaggtggagagagagacagagacagatccattcgattagtgaacggatcggcactgcgtgcgccaattctgcagacaaatggcagtattcatccacaattttaaaagaaaaggggggattggggggtacagtgcaggggaaagaatagtagacataatagcaacagacatacaaactaaagaattacaaaaacaaattacaaaaattcaaaattttcgggtttattacagggacagcagagatccagtttggttaattaaggtaccgagggcctatttcccatgattccttcatatttgcatatacgatacaaggctgttagagagataattagaattaatttgactgtaaacacaaagatattagtacaaaatacgtgacgtagaaagtaataatttcttgggtagtttgcagttttaaaattatgttttaaaatggactatcatatgcttaccgtaacttgaaagtatttcgatttcttggctttatatatcttgtggaaaggacgaaacaccgagatcgaaagttggttggtttgttacctggttgtggaaggtccagttttgaggggctattacaactttttttgaattcacatcgatatctagaggtacccgttacataacttacggtaaatggcccgcctggctgaccgcccaacgacccccgcccattgacgtcaatagtaacgccaatagggactttccattgacgtcaatgggtggagtatttacggtaaactgcccacttggcagtacatcaagtgtatcatatgccaagtacgccccctattgacgtcaatgacggtaaatggcccgcctggcattgtgcccagtacatgaccttatgggactttcctacttggcagtacatctacgtattagtcatcgctattaccatggtcgaggtgagccccacgttctgcttcactctccccatctcccccccctccccacccccaattttgtatttatttattttttaattattttgtgcagcgatgggggcggggggggggggggggcggggcgaggggcggggcggggcgaggcggagaggtgcggcggcagccaatcagagcggcgcgctccgaaagtttccttttatggcgaggcggcggcggcggcggccctataaaaagcgaagcgcgcggcgggcgggagtcgctgcgcgctgccttcgccccgtgccccgctccgccgccgcctcgcgccgcccgccccggctctgactgaccgcgttactcccacaggtgagcgggcgggacggcccttctcctccgggctgtaattagctgagcaagaggtaagggtttaagggatggttggttggtggggtattaatgtttaattacctggagcacctgcctgaaatcactttttttcaggttggaccggtacatcgatactcgagcgccaccatggactacaaagaccatgacggtgattataaagatcatgacatcgattacaaggatgacgatgacaagggatcccttcaactgcctccacttgaaagactgacactgggtagttccaacatccccgctctggtggaaaaccagaagaagtactttggcacctacagcgtgatggccatgctgaacgctcagaccgtgctggaccacatccagaaggtggccgatattgagggcgagcagaacgagaacaacgagaatctgtggtttcaccccgtgatgagccacctgtacaacgccaagaacggctacgacaagcagcccgagaaaaccatgttcatcatcgagcggctgcagagctacttcccattcctgaagatcatggccgagaaccagagagagtacagcaacggcaagtacaagcagaaccgcgtggaagtgaacagcaacgacatcttcgaggtgctgaagcgcgccttcggcgtgctgaagatgtacagggacctgaccaaccactacaagacctacgaggaaaagctgaacgacggctgcgagttcctgaccagcacagagcaacctctgagcggcatgatcaacaactactacacagtggccctgcggaacatgaacgagagatacggctacaagacagaggacctggccttcatccaggacaagcggttcaagttcgtgaaggacgcctacggcaagaaaaagtcccaagtgaataccggattcttcctgagcctgcaggactacaacggcgacacacagaagaagctgcacctgagcggagtgggaatcgccctgctgatctgcctgttcctggacaagcagtacatcaacatctttctgagcaggctgcccatcttctccagctacaatgcccagagcgaggaacggcggatcatcatcagatccttcggcatcaacagcatcaagctgcccaaggaccggatccacagcgagaagtccaacaagagcgtggccatggatatgctcaacgaagtgaagcggtgccccgacgagctgttcacaacactgtctgccgagaagcagtcccggttcagaatcatcagcgacgaccacaatgaagtgctgatgaagcggagcagcgacagattcgtgcctctgctgctgcagtatatcgattacggcaagctgttcgaccacatcaggttccacgtgaacatgggcaagctgagatacctgctgaaggccgacaagacctgcatcgacggccagaccagagtcagagtgatcgagcagcccctgaacggcttcggcagactggaagaggccgagacaatgcggaagcaagagaacggcaccttcggcaacagcggcatccggatcagagacttcgagaacatgaagcgggacgacgccaatcctgccaactatccctacatcgtggacacctacacacactacatcctggaaaacaacaaggtcgagatgtttatcaacgacaaagaggacagcgccccactgctgcccgtgatcgaggatgatagatacgtggtcaagacaatccccagctgccggatgagcaccctggaaattccagccatggccttccacatgtttctgttcggcagcaagaaaaccgagaagctgatcgtggacgtgcacaaccggtacaagagactgttccaggccatgcagaaagaagaagtgaccgccgagaatatcgccagcttcggaatcgccgagagcgacctgcctcagaagatcctggatctgatcagcggcaatgcccacggcaaggatgtggacgccttcatcagactgaccgtggacgacatgctgaccgacaccgagcggagaatcaagagattcaaggacgaccggaagtccattcggagcgccgacaacaagatgggaaagagaggcttcaagcagatctccacaggcaagctggccgacttcctggccaaggacatcgtgctgtttcagcccagcgtgaacgatggcgagaacaagatcaccggcctgaactaccggatcatgcagagcgccattgccgtgtacgatagcggcgacgattacgaggccaagcagcagttcaagctgatgttcgagaaggcccggctgatcggcaagggcacaacagagcctcatccatttctgtacaaggtgttcgcccgcagcatccccgccaatgccgtcgagttctacgagcgctacctgatcgagcggaagttctacctgaccggcctgtccaacgagatcaagaaaggcaacagagtggatgtgcccttcatccggcgggaccagaacaagtggaaaacacccgccatgaagaccctgggcagaatctacagcgaggatctgcccgtggaactgcccagacagatgttcgacaatgagatcaagtcccacctgaagtccctgccacagatggaaggcatcgacttcaacaatgccaacgtgacctatctgatcgccgagtacatgaagagagtgctggacgacgacttccagaccttctaccagtggaaccgcaactaccggtacatggacatgcttaagggcgagtacgacagaaagggctccctgcagcactgcttcaccagcgtggaagagagagaaggcctctggaaagagcgggcctccagaacagagcggtacagaaagcaggccagcaacaagatccgcagcaaccggcagatgagaaacgccagcagcgaagagatcgagacaatcctggataagcggctgagcaacagccggaacgagtaccagaaaagcgagaaagtgatccggcgctacagagtgcaggatgccctgctgtttctgctggccaaaaagaccctgaccgaactggccgatttcgacggcgagaggttcaaactgaaagaaatcatgcccgacgccgagaagggaatcctgagcgagatcatgcccatgagcttcaccttcgagaaaggcggcaagaagtacaccatcaccagcgagggcatgaagctgaagaactacggcgacttctttgtgctggctagcgacaagaggatcggcaacctgctggaactcgtgggcagcgacatcgtgtccaaagaggatatcatggaagagttcaacaaatacgaccagtgcaggcccgagatcagctccatcgtgttcaacctggaaaagtgggccttcgacacataccccgagctgtctgccagagtggaccgggaagagaaggtggacttcaagagcatcctgaaaatcctgctgaacaacaagaacatcaacaaagagcagagcgacatcctgcggaagatccggaacgccttcgatcacaacaattaccccgacaaaggcgtggtggaaatcaaggccctgcctgagatcgccatgagcatcaagaaggcctttggggagtacgccatcatgaagtagtaatctagaacgcgttaagtcgacaatcaacctctggattacaaaatttgtgaaagattgactggtattcttaactatgttgctccttttacgctatgtggatacgctgctttaatgcctttgtatcatgctattgcttcccgtatggctttcattttctcctccttgtataaatcctggttgctgtctctttatgaggagttgtggcccgttgtcaggcaacgtggcgtggtgtgcactgtgtttgctgacgcaacccccactggttggggcattgccaccacctgtcagctcctttccgggactttcgctttccccctccctattgccacggcggaactcatcgccgcctgccttgcccgctgctggacaggggctcggctgttgggcactgacaattccgtggtgttgtcggggaaatcatcgtcctttccttggctgctcgcctgtgttgccacctggattctgcgcgggacgtccttctgctacgtcccttcggccctcaatccagcggaccttccttcccgcggcctgctgccggctctgcggcctcttccgcgtcttcgccttcgccctcagacgagtcggatctccctttgggccgcctccccgcgtcgactttaagaccaatgacttacaaggcagctgtagatcttagccactttttaaaagaaaaggggggactggaagggctaattcactcccaacgaagacaagatctgctttttgcttgtactgggtctctctggttagaccagatctgagcctgggagctctctggctaactagggaacccactgcttaagcctcaataaagcttgccttgagtgcttcaagtagtgtgtgcccgtctgttgtgtgactctggtaactagagatccctcagacccttttagtcagtgtggaaaatctctagcagggcccgtttaaacccgctgatcagcctcgactgtgccttctagttgccagccatctgttgtttgcccctcccccgtgccttccttgaccctggaaggtgccactcccactgtcctttcctaataaaatgaggaaattgcatcgcattgtctgagtaggtgtcattctattctggggggtggggtggggcaggacagcaagggggaggattgggaagacaatagcaggcatgctggggatgcggtgggctctatggcttctgaggcggaaagaaccagctggggctctagggggtatccccacgcgccctgtagcggcgcattaagcgcggcgggtgtggtggttacgcgcagcgtgaccgctacacttgccagcgccctagcgcccgctcctttcgctttcttcccttcctttctcgccacgttcgccggctttccccgtcaagctctaaatcgggggctccctttagggttccgatttagtgctttacggcacctcgaccccaaaaaacttgattagggtgatggttcacgtagtgggccatcgccctgatagacggtttttcgccctttgacgttggagtccacgttctttaatagtggactcttgttccaaactggaacaacactcaaccctatctcggtctattcttttgatttataagggattttgccgatttcggcctattggttaaaaaatgagctgatttaacaaaaatttaacgcgaattaattctgtggaatgtgtgtcagttagggtgtggaaagtccccaggctccccagcaggcagaagtatgcaaagcatgcatctcaattagtcagcaaccaggtgtggaaagtccccaggctccccagcaggcagaagtatgcaaagcatgcatctcaattagtcagcaaccatagtcccgcccctaactccgcccatcccgcccctaactccgcccagttccgcccattctccgccccatggctgactaattttttttatttatgcagaggccgaggccgcctctgcctctgagctattccagaagtagtgaggaggcttttttggaggcctaggcttttgcaaaaagctcccgggagcttgtatatccattttcggatctgatcagcacgtgttgacaattaatcatcggcatagtatatcggcatagtataatacgacaaggtgaggaactaaaccatggccaagttgaccagtgccgttccggtgctcaccgcgcgcgacgtcgccggagcggtcgagttctggaccgaccggctcgggttctcccgggacttcgtggaggacgacttcgccggtgtggtccgggacgacgtgaccctgttcatcagcgcggtccaggaccaggtggtgccggacaacaccctggcctgggtgtgggtgcgcggcctggacgagctgtacgccgagtggtcggaggtcgtgtccacgaacttccgggacgcctccgggccggccatgaccgagatcggcgagcagccgtgggggcgggagttcgccctgcgcgacccggccggcaactgcgtgcacttcgtggccgaggagcaggactgacacgtgctacgagatttcgattccaccgccgccttctatgaaaggttgggcttcggaatcgttttccgggacgccggctggatgatcctccagcgcggggatctcatgctggagttcttcgcccaccccaacttgtttattgcagcttataatggttacaaataaagcaatagcatcacaaatttcacaaataaagcatttttttcactgcattctagttgtggtttgtccaaactcatcaatgtatcttatcatgtctgtataccgtcgacctctagctagagcttggcgtaatcatggtcatagctgtttcctgtgtgaaattgttatccgctcacaattccacacaacatacgagccggaagcataaagtgtaaagcctggggtgcctaatgagtgagctaactcacattaattgcgttgcgctcactgcccgctttccagtcgggaaacctgtcgtgccagctgcattaatgaatcggccaacgcgcggggagaggcggtttgcgtattgggcgctcttccgcttcctcgctcactgactcgctgcgctcggtcgttcggctgcggcgagcggtatcagctcactcaaaggcggtaatacggttatccacagaatcaggggataacgcaggaaagaacatgtgagcaaaaggccagcaaaaggccaggaaccgtaaaaaggccgcgttgctggcgtttttccataggctccgcccccctgacgagcatcacaaaaatcgacgctcaagtcagaggtggcgaaacccgacaggactataaagataccaggcgtttccccctggaagctccctcgtgcgctctcctgttccgaccctgccgcttaccggatacctgtccgcctttctcccttcgggaagcgtggcgctttctcatagctcacgctgtaggtatctcagttcggtgtaggtcgttcgctccaagctgggctgtgtgcacgaaccccccgttcagcccgaccgctgcgccttatccggtaactatcgtcttgagtccaacccggtaagacacgacttatcgccactggcagcagccactggtaacaggattagcagagcgaggtatgtaggcggtgctacagagttcttgaagtggtggcctaactacggctacactagaagaacagtatttggtatctgcgctctgctgaagccagttaccttcggaaaaagagttggtagctcttgatccggcaaacaaaccaccgctggtagcggtggtttttttgtttgcaagcagcagattacgcgcagaaaaaaaggatctcaagaagatcctttgatcttttctacggggtctgacgctcagtggaacgaaaactcacgttaagggattttggtcatgagattatcaaaaaggatcttcacctagatccttttaaattaaaaatgaagttttaaatcaatctaaagtatatatgagtaaacttggtctgacagttaccaatgcttaatcagtgaggcacctatctcagcgatctgtctatttcgttcatccatagttgcctgactccccgtcgtgtagataactacgatacgggagggcttaccatctggccccagtgctgcaatgataccgcgagacccacgctcaccggctccagatttatcagcaataaaccagccagccggaagggccgagcgcagaagtggtcctgcaactttatccgcctccatccagtctattaattgttgccgggaagctagagtaagtagttcgccagttaatagtttgcgcaacgttgttgccattgctacaggcatcgtggtgtcacgctcgtcgtttggtatggcttcattcagctccggttcccaacgatcaaggcgagttacatgatcccccatgttgtgcaaaaaagcggttagctccttcggtcctccgatcgttgtcagaagtaagttggccgcagtgttatcactcatggttatggcagcactgcataattctcttactgtcatgccatccgtaagatgcttttctgtgactggtgagtactcaaccaagtcattctgagaatagtgtatgcggcgaccgagttgctcttgcccggcgtcaatacgggataataccgcgccacatagcagaactttaaaagtgctcatcattggaaaacgttcttcggggcgaaaactctcaaggatcttaccgctgttgagatccagttcgatgtaacccactcgtgcacccaactgatcttcagcatcttttactttcaccagcgtttctgggtgagcaaaaacaggaaggcaaaatgccgcaaaaaagggaataagggcgacacggaaatgttgaatactcatactcttcctttttcaatattattgaagcatttatcagggttattgtctcatgagcggatacatatttgaatgtatttagaaaaataaacaaataggggttccgcgcacatttccccgaaaagtgccacctgac

SEQ ID NO: 408 - DNA, 12213 bp, Artificial Sequence
  chemically synthesized
gtcgacggatcgggagatctcccgatcccctatggtgcactctcagtacaatctgctctgatgccgcatagttaagccagtatctgctccctgcttgtgtgttggaggtcgctgagtagtgcgcgagcaaaatttaagctacaacaaggcaaggcttgaccgacaattgcatgaagaatctgcttagggttaggcgttttgcgctgcttcgcgatgtacgggccagatatacgcgttgacattgattattgactagttattaatagtaatcaattacggggtcattagttcatagcccatatatggagttccgcgttacataacttacggtaaatggcccgcctggctgaccgcccaacgacccccgcccattgacgtcaataatgacgtatgttcccatagtaacgccaatagggactttccattgacgtcaatgggtggagtatttacggtaaactgcccacttggcagtacatcaagtgtatcatatgccaagtacgccccctattgacgtcaatgacggtaaatggcccgcctggcattatgcccagtacatgaccttatgggactttcctacttggcagtacatctacgtattagtcatcgctattaccatggtgatgcggttttggcagtacatcaatgggcgtggatagcggtttgactcacggggatttccaagtctccaccccattgacgtcaatgggagtttgttttggcaccaaaatcaacgggactttccaaaatgtcgtaacaactccgccccattgacgcaaatgggcggtaggcgtgtacggtgggaggtctatataagcagcgcgttttgcctgtactgggtctctctggttagaccagatctgagcctgggagctctctggctaactagggaacccactgcttaagcctcaataaagcttgccttgagtgcttcaagtagtgtgtgcccgtctgttgtgtgactctggtaactagagatccctcagacccttttagtcagtgtggaaaatctctagcagtggcgcccgaacagggacttgaaagcgaaagggaaaccagaggagctctctcgacgcaggactcggcttgctgaagcgcgcacggcaagaggcgaggggcggcgactggtgagtacgccaaaaattttgactagcggaggctagaaggagagagatgggtgcgagagcgtcagtattaagcgggggagaattagatcgcgatgggaaaaaattcggttaaggccagggggaaagaaaaaatataaattaaaacatatagtatgggcaagcagggagctagaacgattcgcagttaatcctggcctgttagaaacatcagaaggctgtagacaaatactgggacagctacaaccatcccttcagacaggatcagaagaacttagatcattatataatacagtagcaaccctctattgtgtgcatcaaaggatagagataaaagacaccaaggaagctttagacaagatagaggaagagcaaaacaaaagtaagaccaccgcacagcaagcggccgctgatcttcagacctggaggaggagatatgagggacaattggagaagtgaattatataaatataaagtagtaaaaattgaaccattaggagtagcacccaccaaggcaaagagaagagtggtgcagagagaaaaaagagcagtgggaataggagctttgttccttgggttcttgggagcagcaggaagcactatgggcgcagcgtcaatgacgctgacggtacaggccagacaattattgtctggtatagtgcagcagcagaacaatttgctgagggctattgaggcgcaacagcatctgttgcaactcacagtctggggcatcaagcagctccaggcaagaatcctggctgtggaaagatacctaaaggatcaacagctcctggggatttggggttgctctggaaaactcatttgcaccactgctgtgccttggaatgctagttggagtaataaatctctggaacagatttggaatcacacgacctggatggagtgggacagagaaattaacaattacacaagcttaatacactccttaattgaagaatcgcaaaaccagcaagaaaagaatgaacaagaattattggaattagataaatgggcaagtttgtggaattggtttaacataacaaattggctgtggtatataaaattattcataatgatagtaggaggcttggtaggtttaagaatagtttttgctgtactttctatagtgaatagagttaggcagggatattcaccattatcgtttcagacccacctcccaaccccgaggggacccgacaggcccgaaggaatagaagaagaaggtggagagagagacagagacagatccattcgattagtgaacggatcggcactgcgtgcgccaattctgcagacaaatggcagtattcatccacaattttaaaagaaaaggggggattggggggtacagtgcaggggaaagaatagtagacataatagcaacagacatacaaactaaagaattacaaaaacaaattacaaaaattcaaaattttcgggtttattacagggacagcagagatccagtttggttaattaaggtaccgagggcctatttcccatgattccttcatatttgcatatacgatacaaggctgttagagagataattagaattaatttgactgtaaacacaaagatattagtacaaaatacgtgacgtagaaagtaataatttcttgggtagtttgcagttttaaaattatgttttaaaatggactatcatatgcttaccgtaacttgaaagtatttcgatttcttggctttatatatcttgtggaaaggacgaaacaccgagatcgaaagttggttggtttgttacctggttgtggaaggtccagtcttgaggggctattacaacgttcccgaaggtgtgacttccatgccaatggttgtggaaggtccagctttgaggggctattacaacgcgtggcctcggtgaaaatgtggtggctctgttgtggaaggtccagttttgaggggctattacaactttttttgaattcacatcgatatctagaggtacccgttacataacttacggtaaatggcccgcctggctgaccgcccaacgacccccgcccattgacgtcaatagtaacgccaatagggactttccattgacgtcaatgggtggagtatttacggtaaactgcccacttggcagtacatcaagtgtatcatatgccaagtacgccccctattgacgtcaatgacggtaaatggcccgcctggcattgtgcccagtacatgaccttatgggactttcctacttggcagtacatctacgtattagtcatcgctattaccatggtcgaggtgagccccacgttctgcttcactctccccatctcccccccctccccacccccaattttgtatttatttattttttaattattttgtgcagcgatgggggcggggggggggggggggcggggcgaggggcggggcggggcgaggcggagaggtgcggcggcagccaatcagagcggcgcgctccgaaagtttccttttatggcgaggcggcggcggcggcggccctataaaaagcgaagcgcgcggcgggcgggagtcgctgcgcgctgccttcgccccgtgccccgctccgccgccgcctcgcgccgcccgccccggctctgactgaccgcgttactcccacaggtgagcgggcgggacggcccttctcctccgggctgtaattagctgagcaagaggtaagggtttaagggatggttggttggtggggtattaatgtttaattacctggagcacctgcctgaaatcactttttttcaggttggaccggtacatcgatactcgagcgccaccatggactacaaagaccatgacggtgattataaagatcatgacatcgattacaaggatgacgatgacaagggatcccttcaactgcctccacttgaaagactgacactgggtagttccaacatccccgctctggtggaaaaccagaagaagtactttggcacctacagcgtgatggccatgctgaacgctcagaccgtgctggaccacatccagaaggtggccgatattgagggcgagcagaacgagaacaacgagaatctgtggtttcaccccgtgatgagccacctgtacaacgccaagaacggctacgacaagcagcccgagaaaaccatgttcatcatcgagcggctgcagagctacttcccattcctgaagatcatggccgagaaccagagagagtacagcaacggcaagtacaagcagaaccgcgtggaagtgaacagcaacgacatcttcgaggtgctgaagcgcgccttcggcgtgctgaagatgtacagggacctgaccaaccactacaagacctacgaggaaaagctgaacgacggctgcgagttcctgaccagcacagagcaacctctgagcggcatgatcaacaactactacacagtggccctgcggaacatgaacgagagatacggctacaagacagaggacctggccttcatccaggacaagcggttcaagttcgtgaaggacgcctacggcaagaaaaagtcccaagtgaataccggattcttcctgagcctgcaggactacaacggcgacacacagaagaagctgcacctgagcggagtgggaatcgccctgctgatctgcctgttcctggacaagcagtacatcaacatctttctgagcaggctgcccatcttctccagctacaatgcccagagcgaggaacggcggatcatcatcagatccttcggcatcaacagcatcaagctgcccaaggaccggatccacagcgagaagtccaacaagagcgtggccatggatatgctcaacgaagtgaagcggtgccccgacgagctgttcacaacactgtctgccgagaagcagtcccggttcagaatcatcagcgacgaccacaatgaagtgctgatgaagcggagcagcgacagattcgtgcctctgctgctgcagtatatcgattacggcaagctgttcgaccacatcaggttccacgtgaacatgggcaagctgagatacctgctgaaggccgacaagacctgcatcgacggccagaccagagtcagagtgatcgagcagcccctgaacggcttcggcagactggaagaggccgagacaatgcggaagcaagagaacggcaccttcggcaacagcggcatccggatcagagacttcgagaacatgaagcgggacgacgccaatcctgccaactatccctacatcgtggacacctacacacactacatcctggaaaacaacaaggtcgagatgtttatcaacgacaaagaggacagcgccccactgctgcccgtgatcgaggatgatagatacgtggtcaagacaatccccagctgccggatgagcaccctggaaattccagccatggccttccacatgtttctgttcggcagcaagaaaaccgagaagctgatcgtggacgtgcacaaccggtacaagagactgttccaggccatgcagaaagaagaagtgaccgccgagaatatcgccagcttcggaatcgccgagagcgacctgcctcagaagatcctggatctgatcagcggcaatgcccacggcaaggatgtggacgccttcatcagactgaccgtggacgacatgctgaccgacaccgagcggagaatcaagagattcaaggacgaccggaagtccattcggagcgccgacaacaagatgggaaagagaggcttcaagcagatctccacaggcaagctggccgacttcctggccaaggacatcgtgctgtttcagcccagcgtgaacgatggcgagaacaagatcaccggcctgaactaccggatcatgcagagcgccattgccgtgtacgatagcggcgacgattacgaggccaagcagcagttcaagctgatgttcgagaaggcccggctgatcggcaagggcacaacagagcctcatccatttctgtacaaggtgttcgcccgcagcatccccgccaatgccgtcgagttctacgagcgctacctgatcgagcggaagttctacctgaccggcctgtccaacgagatcaagaaaggcaacagagtggatgtgcccttcatccggcgggaccagaacaagtggaaaacacccgccatgaagaccctgggcagaatctacagcgaggatctgcccgtggaactgcccagacagatgttcgacaatgagatcaagtcccacctgaagtccctgccacagatggaaggcatcgacttcaacaatgccaacgtgacctatctgatcgccgagtacatgaagagagtgctggacgacgacttccagaccttctaccagtggaaccgcaactaccggtacatggacatgcttaagggcgagtacgacagaaagggctccctgcagcactgcttcaccagcgtggaagagagagaaggcctctggaaagagcgggcctccagaacagagcggtacagaaagcaggccagcaacaagatccgcagcaaccggcagatgagaaacgccagcagcgaagagatcgagacaatcctggataagcggctgagcaacagccggaacgagtaccagaaaagcgagaaagtgatccggcgctacagagtgcaggatgccctgctgtttctgctggccaaaaagaccctgaccgaactggccgatttcgacggcgagaggttcaaactgaaagaaatcatgcccgacgccgagaagggaatcctgagcgagatcatgcccatgagcttcaccttcgagaaaggcggcaagaagtacaccatcaccagcgagggcatgaagctgaagaactacggcgacttctttgtgctggctagcgacaagaggatcggcaacctgctggaactcgtgggcagcgacatcgtgtccaaagaggatatcatggaagagttcaacaaatacgaccagtgcaggcccgagatcagctccatcgtgttcaacctggaaaagtgggccttcgacacataccccgagctgtctgccagagtggaccgggaagagaaggtggacttcaagagcatcctgaaaatcctgctgaacaacaagaacatcaacaaagagcagagcgacatcctgcggaagatccggaacgccttcgatcacaacaattaccccgacaaaggcgtggtggaaatcaaggccctgcctgagatcgccatgagcatcaagaaggcctttggggagtacgccatcatgaagtagtaatctagaacgcgttaagtcgacaatcaacctctggattacaaaatttgtgaaagattgactggtattcttaactatgttgctccttttacgctatgtggatacgctgctttaatgcctttgtatcatgctattgcttcccgtatggctttcattttctcctccttgtataaatcctggttgctgtctctttatgaggagttgtggcccgttgtcaggcaacgtggcgtggtgtgcactgtgtttgctgacgcaacccccactggttggggcattgccaccacctgtcagctcctttccgggactttcgctttccccctccctattgccacggcggaactcatcgccgcctgccttgcccgctgctggacaggggctcggctgttgggcactgacaattccgtggtgttgtcggggaaatcatcgtcctttccttggctgctcgcctgtgttgccacctggattctgcgcgggacgtccttctgctacgtcccttcggccctcaatccagcggaccttccttcccgcggcctgctgccggctctgcggcctcttccgcgtcttcgccttcgccctcagacgagtcggatctccctttgggccgcctccccgcgtcgactttaagaccaatgacttacaaggcagctgtagatcttagccactttttaaaagaaaaggggggactggaagggctaattcactcccaacgaagacaagatctgctttttgcttgtactgggtctctctggttagaccagatctgagcctgggagctctctggctaactagggaacccactgcttaagcctcaataaagcttgccttgagtgcttcaagtagtgtgtgcccgtctgttgtgtgactctggtaactagagatccctcagacccttttagtcagtgtggaaaatctctagcagggcccgtttaaacccgctgatcagcctcgactgtgccttctagttgccagccatctgttgtttgcccctcccccgtgccttccttgaccctggaaggtgccactcccactgtcctttcctaataaaatgaggaaattgcatcgcattgtctgagtaggtgtcattctattctggggggtggggtggggcaggacagcaagggggaggattgggaagacaatagcaggcatgctggggatgcggtgggctctatggcttctgaggcggaaagaaccagctggggctctagggggtatccccacgcgccctgtagcggcgcattaagcgcggcgggtgtggtggttacgcgcagcgtgaccgctacacttgccagcgccctagcgcccgctcctttcgctttcttcccttcctttctcgccacgttcgccggctttccccgtcaagctctaaatcgggggctccctttagggttccgatttagtgctttacggcacctcgaccccaaaaaacttgattagggtgatggttcacgtagtgggccatcgccctgatagacggtttttcgccctttgacgttggagtccacgttctttaatagtggactcttgttccaaactggaacaacactcaaccctatctcggtctattcttttgatttataagggattttgccgatttcggcctattggttaaaaaatgagctgatttaacaaaaatttaacgcgaattaattctgtggaatgtgtgtcagttagggtgtggaaagtccccaggctccccagcaggcagaagtatgcaaagcatgcatctcaattagtcagcaaccaggtgtggaaagtccccaggctccccagcaggcagaagtatgcaaagcatgcatctcaattagtcagcaaccatagtcccgcccctaactccgcccatcccgcccctaactccgcccagttccgcccattctccgccccatggctgactaattttttttatttatgcagaggccgaggccgcctctgcctctgagctattccagaagtagtgaggaggcttttttggaggcctaggcttttgcaaaaagctcccgggagcttgtatatccattttcggatctgatcagcacgtgttgacaattaatcatcggcatagtatatcggcatagtataatacgacaaggtgaggaactaaaccatggccaagttgaccagtgccgttccggtgctcaccgcgcgcgacgtcgccggagcggtcgagttctggaccgaccggctcgggttctcccgggacttcgtggaggacgacttcgccggtgtggtccgggacgacgtgaccctgttcatcagcgcggtccaggaccaggtggtgccggacaacaccctggcctgggtgtgggtgcgcggcctggacgagctgtacgccgagtggtcggaggtcgtgtccacgaacttccgggacgcctccgggccggccatgaccgagatcggcgagcagccgtgggggcgggagttcgccctgcgcgacccggccggcaactgcgtgcacttcgtggccgaggagcaggactgacacgtgctacgagatttcgattccaccgccgccttctatgaaaggttgggcttcggaatcgttttccgggacgccggctggatgatcctccagcgcggggatctcatgctggagttcttcgcccaccccaacttgtttattgcagcttataatggttacaaataaagcaatagcatcacaaatttcacaaataaagcatttttttcactgcattctagttgtggtttgtccaaactcatcaatgtatcttatcatgtctgtataccgtcgacctctagctagagcttggcgtaatcatggtcatagctgtttcctgtgtgaaattgttatccgctcacaattccacacaacatacgagccggaagcataaagtgtaaagcctggggtgcctaatgagtgagctaactcacattaattgcgttgcgctcactgcccgctttccagtcgggaaacctgtcgtgccagctgcattaatgaatcggccaacgcgcggggagaggcggtttgcgtattgggcgctcttccgcttcctcgctcactgactcgctgcgctcggtcgttcggctgcggcgagcggtatcagctcactcaaaggcggtaatacggttatccacagaatcaggggataacgcaggaaagaacatgtgagcaaaaggccagcaaaaggccaggaaccgtaaaaaggccgcgttgctggcgtttttccataggctccgcccccctgacgagcatcacaaaaatcgacgctcaagtcagaggtggcgaaacccgacaggactataaagataccaggcgtttccccctggaagctccctcgtgcgctctcctgttccgaccctgccgcttaccggatacctgtccgcctttctcccttcgggaagcgtggcgctttctcatagctcacgctgtaggtatctcagttcggtgtaggtcgttcgctccaagctgggctgtgtgcacgaaccccccgttcagcccgaccgctgcgccttatccggtaactatcgtcttgagtccaacccggtaagacacgacttatcgccactggcagcagccactggtaacaggattagcagagcgaggtatgtaggcggtgctacagagttcttgaagtggtggcctaactacggctacactagaagaacagtatttggtatctgcgctctgctgaagccagttaccttcggaaaaagagttggtagctcttgatccggcaaacaaaccaccgctggtagcggtggtttttttgtttgcaagcagcagattacgcgcagaaaaaaaggatctcaagaagatcctttgatcttttctacggggtctgacgctcagtggaacgaaaactcacgttaagggattttggtcatgagattatcaaaaaggatcttcacctagatccttttaaattaaaaatgaagttttaaatcaatctaaagtatatatgagtaaacttggtctgacagttaccaatgcttaatcagtgaggcacctatctcagcgatctgtctatttcgttcatccatagttgcctgactccccgtcgtgtagataactacgatacgggagggcttaccatctggccccagtgctgcaatgataccgcgagacccacgctcaccggctccagatttatcagcaataaaccagccagccggaagggccgagcgcagaagtggtcctgcaactttatccgcctccatccagtctattaattgttgccgggaagctagagtaagtagttcgccagttaatagtttgcgcaacgttgttgccattgctacaggcatcgtggtgtcacgctcgtcgtttggtatggcttcattcagctccggttcccaacgatcaaggcgagttacatgatcccccatgttgtgcaaaaaagcggttagctccttcggtcctccgatcgttgtcagaagtaagttggccgcagtgttatcactcatggttatggcagcactgcataattctcttactgtcatgccatccgtaagatgcttttctgtgactggtgagtactcaaccaagtcattctgagaatagtgtatgcggcgaccgagttgctcttgcccggcgtcaatacgggataataccgcgccacatagcagaactttaaaagtgctcatcattggaaaacgttcttcggggcgaaaactctcaaggatcttaccgctgttgagatccagttcgatgtaacccactcgtgcacccaactgatcttcagcatcttttactttcaccagcgtttctgggtgagcaaaaacaggaaggcaaaatgccgcaaaaaagggaataagggcgacacggaaatgttgaatactcatactcttcctttttcaatattattgaagcatttatcagggttattgtctcatgagcggatacatatttgaatgtatttagaaaaataaacaaataggggttccgcgcacatttccccgaaaagtgccacctgac

SEQ ID NO: 409 - DNA, 6459 bp, Artificial Sequence
  chemically synthesized
ggcgcccctgcaggcagctgcgcgctcgctcgctcactgaggccgcccgggcaaagcccgggcgtcgggcgacctttggtcgcccggcctcagtgagcgagcgagcgcgcagagagggagtggccaactccatcactaggggttcctgcggccgcggtaccgagggcctatttcccatgattccttcatatttgcatatacgatacaaggctgttagagagataattagaattaatttgactgtaaacacaaagatattagtacaaaatacgtgacgtagaaagtaataatttcttgggtagtttgcagttttaaaattatgttttaaaatggactatcatatgcttaccgtaacttgaaagtatttcgatttcttggctttatatatcttgtggaaaggacgaaacaccgagatcgaaagttggttggtttgttacctggttgtggaaggtccagtcttgaggggctattacaacgttcccgaaggtgtgacttccatgccaatggttgtggaaggtccagctttgaggggctattacaacgcgtggcctcggtgaaaatgtggtggctctgttgtggaaggtccagttttgaggggctattacaactttttttgaattcgctagctaggtcttgaaaggagtgggaattggctccggtgcccgtcagtgggcagagcgcacatcgcccacagtccccgagaagttggggggaggggtcggcaattgatccggtgcctagagaaggtggcgcggggtaaactgggaaagtgatgtcgtgtactggctccgcctttttcccgagggtgggggagaaccgtatataagtgcagtagtcgccgtgaacgttctttttcgcaacgggtttgccgccagaacacaggctcgagcgccaccatggactacaaagaccatgacggtgattataaagatcatgacatcgattacaaggatgacgatgacaagggatcccttcaactgcctccacttgaaagactgacactgggtagttccaacatccccgctctggtggaaaaccagaagaagtactttggcacctacagcgtgatggccatgctgaacgctcagaccgtgctggaccacatccagaaggtggccgatattgagggcgagcagaacgagaacaacgagaatctgtggtttcaccccgtgatgagccacctgtacaacgccaagaacggctacgacaagcagcccgagaaaaccatgttcatcatcgagcggctgcagagctacttcccattcctgaagatcatggccgagaaccagagagagtacagcaacggcaagtacaagcagaaccgcgtggaagtgaacagcaacgacatcttcgaggtgctgaagcgcgccttcggcgtgctgaagatgtacagggacctgaccaaccactacaagacctacgaggaaaagctgaacgacggctgcgagttcctgaccagcacagagcaacctctgagcggcatgatcaacaactactacacagtggccctgcggaacatgaacgagagatacggctacaagacagaggacctggccttcatccaggacaagcggttcaagttcgtgaaggacgcctacggcaagaaaaagtcccaagtgaataccggattcttcctgagcctgcaggactacaacggcgacacacagaagaagctgcacctgagcggagtgggaatcgccctgctgatctgcctgttcctggacaagcagtacatcaacatctttctgagcaggctgcccatcttctccagctacaatgcccagagcgaggaacggcggatcatcatcagatccttcggcatcaacagcatcaagctgcccaaggaccggatccacagcgagaagtccaacaagagcgtggccatggatatgctcaacgaagtgaagcggtgccccgacgagctgttcacaacactgtctgccgagaagcagtcccggttcagaatcatcagcgacgaccacaatgaagtgctgatgaagcggagcagcgacagattcgtgcctctgctgctgcagtatatcgattacggcaagctgttcgaccacatcaggttccacgtgaacatgggcaagctgagatacctgctgaaggccgacaagacctgcatcgacggccagaccagagtcagagtgatcgagcagcccctgaacggcttcggcagactggaagaggccgagacaatgcggaagcaagagaacggcaccttcggcaacagcggcatccggatcagagacttcgagaacatgaagcgggacgacgccaatcctgccaactatccctacatcgtggacacctacacacactacatcctggaaaacaacaaggtcgagatgtttatcaacgacaaagaggacagcgccccactgctgcccgtgatcgaggatgatagatacgtggtcaagacaatccccagctgccggatgagcaccctggaaattccagccatggccttccacatgtttctgttcggcagcaagaaaaccgagaagctgatcgtggacgtgcacaaccggtacaagagactgttccaggccatgcagaaagaagaagtgaccgccgagaatatcgccagcttcggaatcgccgagagcgacctgcctcagaagatcctggatctgatcagcggcaatgcccacggcaaggatgtggacgccttcatcagactgaccgtggacgacatgctgaccgacaccgagcggagaatcaagagattcaaggacgaccggaagtccattcggagcgccgacaacaagatgggaaagagaggcttcaagcagatctccacaggcaagctggccgacttcctggccaaggacatcgtgctgtttcagcccagcgtgaacgatggcgagaacaagatcaccggcctgaactaccggatcatgcagagcgccattgccgtgtacgatagcggcgacgattacgaggccaagcagcagttcaagctgatgttcgagaaggcccggctgatcggcaagggcacaacagagcctcatccatttctgtacaaggtgttcgcccgcagcatccccgccaatgccgtcgagttctacgagcgctacctgatcgagcggaagttctacctgaccggcctgtccaacgagatcaagaaaggcaacagagtggatgtgcccttcatccggcgggaccagaacaagtggaaaacacccgccatgaagaccctgggcagaatctacagcgaggatctgcccgtggaactgcccagacagatgttcgacaatgagatcaagtcccacctgaagtccctgccacagatggaaggcatcgacttcaacaatgccaacgtgacctatctgatcgccgagtacatgaagagagtgctggacgacgacttccagaccttctaccagtggaaccgcaactaccggtacatggacatgcttaagggcgagtacgacagaaagggctccctgcagcactgcttcaccagcgtggaagagagagaaggcctctggaaagagcgggcctccagaacagagcggtacagaaagcaggccagcaacaagatccgcagcaaccggcagatgagaaacgccagcagcgaagagatcgagacaatcctggataagcggctgagcaacagccggaacgagtaccagaaaagcgagaaagtgatccggcgctacagagtgcaggatgccctgctgtttctgctggccaaaaagaccctgaccgaactggccgatttcgacggcgagaggttcaaactgaaagaaatcatgcccgacgccgagaagggaatcctgagcgagatcatgcccatgagcttcaccttcgagaaaggcggcaagaagtacaccatcaccagcgagggcatgaagctgaagaactacggcgacttctttgtgctggctagcgacaagaggatcggcaacctgctggaactcgtgggcagcgacatcgtgtccaaagaggatatcatggaagagttcaacaaatacgaccagtgcaggcccgagatcagctccatcgtgttcaacctggaaaagtgggccttcgacacataccccgagctgtctgccagagtggaccgggaagagaaggtggacttcaagagcatcctgaaaatcctgctgaacaacaagaacatcaacaaagagcagagcgacatcctgcggaagatccggaacgccttcgatcacaacaattaccccgacaaaggcgtggtggaaatcaaggccctgcctgagatcgccatgagcatcaagaaggcctttggggagtacgccatcatgaagtagtaatctagaaattcctagagctcgctgatcagcctcgactgtgccttctagttgccagccatctgttgtttgcccctcccccgtgccttccttgaccctggaaggtgccactcccactgtcctttcctaataaaatgaggaaattgcatcgcattgtctgagtaggtgtcattctattctggggggtggggtggggcaggacagcaagggggaggattgggaagagaatagcaggcatgctggggagctagaggccgcaggaacccctagtgatggagttggccactccctctctgcgcgctcgctcgctcactgaggccgggcgaccaaaggtcgcccgacgcccgggcggcctcagtgagcgagcgagcgcgcagctgcctgcaggacatgtatagctagactgggcggttttatggacagcaagcgaacgcggaacccctatttgtttatttttctaaatacattcaaatatgtatccgctcatgagacaataaccctgataaatgcttcaataatattgaaaaaggaagagtatgagtattcaacatttccgtgtcgcccttattcccttttttgcggcattttgccttcctgtttttgctcacccagaaacgctggtgaaagtaaaagatgctgaagatcagttgggtgcacgagtgggttacatcgaactggatctcaacagcggtaagatccttgagagttttcgccccgaagaacgttttccaatgatgagcacttttaaagttctgctatgtggcgcggtattatcccgtattgacgccgggcaagagcaactcggtcgccgcatacactattctcagaatgacttggttgagtactcaccagtcacagaaaagcatcttacggatggcatgacagtaagagaattatgcagtgctgccataaccatgagtgataacactgcggccaacttacttctgacaacgatcggaggaccgaaggagctaaccgcttttttgcacaacatgggggatcatgtaactcgccttgatcgttgggaaccggagctgaatgaagccataccaaacgacgagcgtgacaccacgatgcctgtagcaatggcaacaacgttgcgcaaactattaactggcgaactacttactctagcttcccggcaacaattaatagactggatggaggcggataaagttgcaggaccacttctgcgctcggcccttccggctggctggtttattgctgataaatctggagccggtgagcgtgggtctcgcggtatcattgcagcactggggccagatggtaagccctcccgtatcgtagttatctacacgacggggagtcaggcaactatggatgaacgaaatagacagatcgctgagataggtgcctcactgattaagcattggtaactttagattgatttaaaacttcatttttaatttaaaaggatctaggtgaagatcctttttgataatctcatgaccaaaatcccttaacgtgagttttcgttccactgagcgtcagaccccgtagaaaagatcaaaggatcttcttgagatcctttttttctgcgcgtaatctgctgcttgcaaacaaaaaaaccaccgctaccagcggtggtttgtttgccggatcaagagctaccaactctttttccgaaggtaactggcttcagcagagcgcagataccaaatactgttcttctagtgtagccgtagttaggccaccacttcaagaactctgtagcaccgcctacatacctcgctctgctaatcctgttaccagtggctgctgccagtggcgataagtcgtgtcttaccgggttggactcaagacgatagttaccggataaggcgcagcggtcgggctgaacggggggttcgtgcacacagcccagcttggagcgaacgacctacaccgaactgagatacctacagcgtgagctatgagaaagcgccacgcttcccgaagggagaaaggcggacaggtatccggtaagcggcagggtcggaacaggagagcgcacgagggagcttccagggggaaacgcctggtatctttatagtcctgtcgggtttcgccacctctgacttgagcgtcgatttttgtgatgctcgtcaggggggcggagcctatggaaaaacgccagcaacgcggcctttttacggttcctggccttttgctggaa

SEQ ID NO: 410 - DNA, 2153 bp, Artificial Sequence
  chemically synthesized
tgcatctcaattagtcagcaaccatagtcccgcccctaactccgcccatcccgcccctaactccgcccagttccgcccattctccgccccatcgctgactaattttttttatttatgcagaggccgaggccgcctcggcctctgagctattccagaagtagtgaggaggcttttttggaggcctaggcttttgcaaaaagcttggcattccggtactgttggtaaagccaccatggaagacgccaaaaacataaagaaaggcccggcgccattctatccgctggaagatggaaccgctggagagcaactgcataaggctatgaagagatacgccctggttcctggaacaattgcttttacagatgcacatatcgaggtggacatcacttacgctgagtacttcgaaatgtccgttcggttggcagaagctatgaaacgatatgggctgaatacaaatcacagaatcgtcgtatgcagtgaaaactctcttcaattctttatgccggtgttgggcgcgttatttatcggagttgcagttgcgcccgcgaacgacatttataatgaacgtgaattgctcaacagtatgggcatttcgcagcctaccgtggtgttcgtttccaaaaaggggttgcaaaaaattttgaacgtgcaaaaaaagctcccaatcatccaaaaaattattatcatggattctaaaacggattaccagggatttcagtcgatgtacacgttcgtcacatctcatctacctcccggttttaatgaatacgattttgtgccagagtccttcgatagggacaagacaattgcactgatcatgaactcctctggatctactggtctgcctaaaggtgtcgctctgcctcatagaactgcctgcgtgagattctcgcatgccagagatcctatttttggcaatcaaatcattccggatactgcgattttaagtgttgttccattccatcacggttttggaatgtttactacactcggatatttgatatgtggatttcgagtcgtcttaatgtatagatttgaagaagagctgtttctgaggagccttcaggattacaagattcaaagtgcgctgctggtgccaaccctattctccttcttcgccaaaagcactctgattgacaaatacgatttatctaatttacacgaaattgcttctggtggcgctcccctctctaaggaagtcggggaagcggttgccaagaggttccatctgccaggtatcaggcaaggatatgggctcactgagactacatcagctattctgattacacccgagggggatgataaaccgggcgcggtcggtaaagttgttccattttttgaagcgaaggttgtggatctggataccgggaaaacgctgggcgttaatcaaagaggcgaactgtgtgtgagaggtcctatgattatgtccggttatgtaaacaatccggaagcgaccaacgccttgattgacaaggatggatggctacattctggagacatagcttactgggacgaagacgaacacttcttcatcgttgaccgcctgaagtctctgattaagtacaaaggctatcaggtggctcccgctgaattggaatccatcttgctccaacaccccaacatcttcgacgcaggtgtcgcaggtcttcccgacgatgacgccggtgaacttcccgccgccgttgttgttttggagcacggaaagacgatgacggaaaaagagatcgtggattacgtcgccagtcaagtaacaaccgcgaaaaagttgcgcggaggagttgtgtttgtggacgaagtaccgaaaggtcttaccggaaaactcgacgcaagaaaaatcagagagatcctcataaaggccaagaagggcggaaagatcgccgtgtaattctagagtcggggcggccggccgcttcgagcagacatgataagatacattgatgagtttggacaaaccacaactagaatgcagtgaaaaaaatgctttatttgtgaaatttgtgatgctattgctttatttgtaaccattataagctgcaataaacaagttaacaacaacaattgcattcattttatgtttcaggttcagggggaggtgtgggaggttttttaaagcaagtaaaacctctacaaatgtggtaaaatcgataaggatc

SEQ ID NO: 411 - DNA, 2394 bp, Artificial Sequence
  chemically synthesized
tgcatctcaattagtcagcaaccatagtcccgcccctaactccgcccatcccgcccctaactccgcccagttccgcccattctccgccccatcgctgactaattttttttatttatgcagaggccgaggccgcctcggcctctgagctattccagaagtagtgaggaggcttttttggaggcctaggcttttgcaaaaagcttggcattccggtactgttggtaaagccaccatggaagacgccaaaaacataaagaaaggcccggcgccattctatccgctggaagatggaaccgctggagagcaactgcataaggctatgaagagatacgccctggttcctggaacaattgcttttacagatgcacatatcgaggtggacatcacttacgctgagtacttcgaaatgtccgttcggttggcagaagctatgaaacgatatgggctgaatacaaatcacagaatcgtcgtatgcagtgaaaactctcttcaattctttatgccggtgttgggcgcgttatttatcggagttgcagttgcgcccgcgaacgacatttataatgaacgtgaattgctcaacagtatgggcatttcgcagcctaccgtggtgttcgtttccaaaaaggggttgcaaaaaattttgaacgtgcaaaaaaagctcccaatcatccaaaaaattattatcatggattctaaaacggattaccagggatttcagtcgatgtacacgttcgtcacatctcatctacctcccggttttaatgaatacgattttgtgccagagtccttcgatagggacaagacaattgcactgatcatgaactcctctggatctactggtctgcctaaaggtgtcgctctgcctcatagaactgcctgcgtgagattctcgcatgccagagatcctatttttggcaatcaaatcattccggatactgcgattttaagtgttgttccattccatcacggttttggaatgtttactacactcggatatttgatatgtggatttcgagtcgtcttaatgtatagatttgaagaagagctgtttctgaggagccttcaggattacaagattcaaagtgcgctgctggtgccaaccctattctccttcttcgccaaaagcactctgattgacaaatacgatttatctaatttacacgaaattgcttctggtggcgctcccctctctaaggaagtcggggaagcggttgccaagaggttccatctgccaggtatcaggcaaggatatgggctcactgagactacatcagctattctgattacacccgagggggatgataaaccgggcgcggtcggtaaagttgttccattttttgaagcgaaggttgtggatctggataccgggaaaacgctgggcgttaatcaaagaggcgaactgtgtgtgagaggtcctatgattatgtccggttatgtaaacaatccggaagcgaccaacgccttgattgacaaggatggatggctacattctggagacatagcttactgggacgaagacgaacacttcttcatcgttgaccgcctgaagtctctgattaagtacaaaggctatcaggtggctcccgctgaattggaatccatcttgctccaacaccccaacatcttcgacgcaggtgtcgcaggtcttcccgacgatgacgccggtgaacttcccgccgccgttgttgttttggagcacggaaagacgatgacggaaaaagagatcgtggattacgtcgccagtcaagtaacaaccgcgaaaaagttgcgcggaggagttgtgtttgtggacgaagtaccgaaaggtcttaccggaaaactcgacgcaagaaaaatcagagagatcctcataaaggccaagaagggcggaaagatcgccgtgtaattctagagtcggggcggccggccgcttcgagcagacatgataagatacattgatgagtttggacaaaccacaactagaatgcagtgaaaaaaatgctttatttgtgaaatttgtgatgctattgctttatttgtaaccattataagctgcaataaacaagttaacaacaacaattgcattcattttatgtttcaggttcagggggaggtgtgggaggttttttaaagcaagtaaaacctctacaaatgtggtaaaatcgataaggatctgaacgatggagcggagaatgggcggaactgggcggagttaggggcgggatgggcggagttaggggcgggactatggttgctgactaattgagatgcatgctttgcatacttctgcctgctggggagcctggggactttccacacctggttgctgactaattgagatgcatgctttgcatacttctgcctgctggggagcctggggactttccacaccctaactgacacacattccacagc

SEQ ID NO: 412 - DNA, 2565 bp, Artificial Sequence
  chemically synthesized
tgcatctcaattagtcagcaaccatagtcccgcccctaactccgcccatcccgcccctaactccgcccagttccgcccattctccgccccatcgctgactaattttttttatttatgcagaggccgaggccgcctcggcctctgagctattccagaagtagtgaggaggcttttttggaggcctaggcttttgcaaaaagcttggcattccggtactgttggtaaagccaccatggaagacgccaaaaacataaagaaaggcccggcgccattctatccgctggaagatggaaccgctggagagcaactgcataaggctatgaagagatacgccctggttcctggaacaattgcttttacagatgcacatatcgaggtggacatcacttacgctgagtacttcgaaatgtccgttcggttggcagaagctatgaaacgatatgggctgaatacaaatcacagaatcgtcgtatgcagtgaaaactctcttcaattctttatgccggtgttgggcgcgttatttatcggagttgcagttgcgcccgcgaacgacatttataatgaacgtgaattgctcaacagtatgggcatttcgcagcctaccgtggtgttcgtttccaaaaaggggttgcaaaaaattttgaacgtgcaaaaaaagctcccaatcatccaaaaaattattatcatggattctaaaacggattaccagggatttcagtcgatgtacacgttcgtcacatctcatctacctcccggttttaatgaatacgattttgtgccagagtccttcgatagggacaagacaattgcactgatcatgaactcctctggatctactggtctgcctaaaggtgtcgctctgcctcatagaactgcctgcgtgagattctcgcatgccagagatcctatttttggcaatcaaatcattccggatactgcgattttaagtgttgttccattccatcacggttttggaatgtttactacactcggatatttgatatgtggatttcgagtcgtcttaatgtatagatttgaagaagagctgtttctgaggagccttcaggattacaagattcaaagtgcgctgctggtgccaaccctattctccttcttcgccaaaagcactctgattgacaaatacgatttatctaatttacacgaaattgcttctggtggcgctcccctctctaaggaagtcggggaagcggttgccaagaggttccatctgccaggtatcaggcaaggatatgggctcactgagactacatcagctattctgattacacccgagggggatgataaaccgggcgcggtcggtaaagttgttccattttttgaagcgaaggttgtggatctggataccgggaaaacgctgggcgttaatcaaagaggcgaactgtgtgtgagaggtcctatgattatgtccggttatgtaaacaatccggaagcgaccaacgccttgattgacaaggatggatggctacattctggagacatagcttactgggacgaagacgaacacttcttcatcgttgaccgcctgaagtctctgattaagtacaaaggctatcaggtggctcccgctgaattggaatccatcttgctccaacaccccaacatcttcgacgcaggtgtcgcaggtcttcccgacgatgacgccggtgaacttcccgccgccgttgttgttttggagcacggaaagacgatgacggaaaaagagatcgtggattacgtcgccagtcaagtaacaaccgcgaaaaagttgcgcggaggagttgtgtttgtggacgaagtaccgaaaggtcttaccggaaaactcgacgcaagaaaaatcagagagatcctcataaaggccaagaagggcggaaagatcgccgtggcttgcaagaactggttcagtagcttaagccactttgtgatccaccttaacagccacggcttccctcccgaggtggaggagcaggccgccggcaccctgcccatgagctgcgcccaggagagcggcatggatagacaccctgctgcttgcgccagcgccaggatcaacgtctaattctagagtcggggcggccggccgcttcgagcagacatgataagatacattgatgagtttggacaaaccacaactagaatgcagtgaaaaaaatgctttatttgtgaaatttgtgatgctattgctttatttgtaaccattataagctgcaataaacaagttaacaacaacaattgcattcattttatgtttcaggttcagggggaggtgtgggaggttttttaaagcaagtaaaacctctacaaatgtggtaaaatcgataaggatctgaacgatggagcggagaatgggcggaactgggcggagttaggggcgggatgggcggagttaggggcgggactatggttgctgactaattgagatgcatgctttgcatacttctgcctgctggggagcctggggactttccacacctggttgctgactaattgagatgcatgctttgcatacttctgcctgctggggagcctggggactttccacaccctaactgacacacattccacagc

SEQ ID NO: 413 - DNA, 30 bp, Artificial Sequence
  chemically synthesized
gtcgttcgcgggcgcaactgcaactccgat

SEQ ID NO: 414 - DNA, 30 bp, Artificial Sequence
  chemically synthesized
gctgatgtagtctcagtgagcccatatcct

SEQ ID NO: 415 - DNA, 28 bp, Artificial Sequence
  chemically synthesized
agggttttcccagtcacgacgttgtaaa

SEQ ID NO: 416 - DNA, 28 bp, Artificial Sequence
  chemically synthesized
ttaccgaccgcgcccggtttatcatccc

SEQ ID NO: 417 - DNA, 28 bp, Artificial Sequence
  chemically synthesized
ggtaggctgcgaaatgcccatactgttg

SEQ ID NO: 418 - DNA, 22 bp, Artificial Sequence
  chemically synthesized
gttttcccagtcacgacgttgt

SEQ ID NO: 419 - DNA, 22 bp, Artificial Sequence
  chemically synthesized
accgcgcccggtttatcatccc

SEQ ID NO: 420 - DNA, 22 bp, Artificial Sequence
  chemically synthesized
ctgcgaaatgcccatactgttg

SEQ ID NO: 421 - DNA, 2693 bp, Artificial Sequence
  chemically synthesized
tgcatctcaattagtcagcaaccatagtcccgcccctaactccgcccatcccgcccctaactccgcccagttccgcccattctccgccccatcgctgactaattttttttatttatgcagaggccgaggccgcctcggcctctgagctattccagaagtagtgaggaggcttttttggaggcctaggcttttgcaaaaagcttttaaaggtttataccttcccaggtaacaaaccaaccaactttcgatctcttgtagatctgttctctaaacgaactttaagccagccaccatggaagacgccaaaaacataaagaaaggcccggcgccattctatccgctggaagatggaaccgctggagagcaactgcataaggctatgaagagatacgccctggttcctggaacaattgcttttacagatgcacatatcgaggtggacatcacttacgctgagtacttcgaaatgtccgttcggttggcagaagctatgaaacgatatgggctgaatacaaatcacagaatcgtcgtatgcagtgaaaactctcttcaattctttatgccggtgttgggcgcgttatttatcggagttgcagttgcgcccgcgaacgacatttataatgaacgtgaattgctcaacagtatgggcatttcgcagcctaccgtggtgttcgtttccaaaaaggggttgcaaaaaattttgaacgtgcaaaaaaagctcccaatcatccaaaaaattattatcatggattctaaaacggattaccagggatttcagtcgatgtacacgttcgtcacatctcatctacctcccggttttaatgaatacgattttgtgccagagtccttcgatagggacaagacaattgcactgatcatgaactcctctggatctactggtctgcctaaaggtgtcgctctgcctcatagaactgcctgcgtgagattctcgcatgccagagatcctatttttggcaatcaaatcattccggatactgcgattttaagtgttgttccattccatcacggttttggaatgtttactacactcggatatttgatatgtggatttcgagtcgtcttaatgtatagatttgaagaagagctgtttctgaggagccttcaggattacaagattcaaagtgcgctgctggtgccaaccctattctccttcttcgccaaaagcactctgattgacaaatacgatttatctaatttacacgaaattgcttctggtggcgctcccctctctaaggaagtcggggaagcggttgccaagaggttccatctgccaggtatcaggcaaggatatgggctcactgagactacatcagctattctgattacacccgagggggatgataaaccgggcgcggtcggtaaagttgttccattttttgaagcgaaggttgtggatctggataccgggaaaacgctgggcgttaatcaaagaggcgaactgtgtgtgagaggtcctatgattatgtccggttatgtaaacaatccggaagcgaccaacgccttgattgacaaggatggatggctacattctggagacatagcttactgggacgaagacgaacacttcttcatcgttgaccgcctgaagtctctgattaagtacaaaggctatcaggtggctcccgctgaattggaatccatcttgctccaacaccccaacatcttcgacgcaggtgtcgcaggtcttcccgacgatgacgccggtgaacttcccgccgccgttgttgttttggagcacggaaagacgatgacggaaaaagagatcgtggattacgtcgccagtcaagtaacaaccgcgaaaaagttgcgcggaggagttgtgtttgtggacgaagtaccgaaaggtcttaccggaaaactcgacgcaagaaaaatcagagagatcctcataaaggccaagaagggcggaaagatcgccgtggcttgcaagaactggttcagtagcttaagccactttgtgatccaccttaacagccacggcttccctcccgaggtggaggagcaggccgccggcaccctgcccatgagctgcgcccaggagagcggcatggatagacaccctgctgcttgcgccagcgccaggatcaacgtctaattctagaatcgtgctacaacttcctcaaggaacaacattgccaaaagcgcgcattggcatggaagtcacaccttcgggaacgtggccggccgcttcgagcagacatgataagatacattgatgagtttggacaaaccacaactagaatgcagtgaaaaaaatgctttatttgtgaaatttgtgatgctattgctttatttgtaaccattataagctgcaataaacaagttaacaacaacaattgcattcattttatgtttcaggttcagggggaggtgtgggaggttttttaaagcaagtaaaacctctacaaatgtggtaaaatcgataaggatctgaacgatggagcggagaatgggcggaactgggcggagttaggggcgggatgggcggagttaggggcgggactatggttgctgactaattgagatgcatgctttgcatacttctgcctgctggggagcctggggactttccacacctggttgctgactaattgagatgcatgctttgcatacttctgcctgctggggagcctggggactttccacaccctaactgacacacattccacagc

SEQ ID NO: 422 - DNA, 1143 bp, Artificial Sequence
  chemically synthesized
gcagtctctgtaacaccaattagggataccaaatggctgacgctggaggtatgccgagagtttcaacgcggaacctgtagtcgccctgatacggagtgcaagtttgcccacccctctaagtcttgccaagtagagaatgggagagtcatcgcttgcttcgacagtcttaaaggccgatgttcacgggaaaactgcaaatatcttcacccgccgccacatctcaaaactcagcttgagatcaacggtcggaacaaccttatccaacagaaaaatatggctatgttggcgcagcagatgcagcttgcaaatgctatgatgcccggtgcacctttgcaaccggttccaatgttctcagtggctccatccctcgcaacaaatgcctccgcagcggcttttaacccgtacctcggccccgtatccccatcccttgtgcccgcggagatacttccgacggcacccatgttggttacaggcaatccaggggtacccgtacccgcggcagcggccgctgcggcgcaaaaacttatgcggacagatcggctcgaagtctgtagagaatatcaaaggggtaactgtaacaggggggaaaacgactgcagattcgctcacccagcggatagtacaatgatcgacacgaatgacaacaccgttaccgtatgcatggactacattaagggccgctgcagcagagagaagtgcaaatactttcacccacccgcccatctgcaagccaaaatcaaggcggctcaataccaagtcaatcaagcggcggccgctcaagccgcagccactgcggcagcaatgggtatcccgcaagccgttcttccccctctcccaaagcgaccggccctcgaaaaaaccaatggagctaccgccgtcttcaatacgggcatcttccagtaccaacaagccttggctaatatgcaacttcaacaacacacagcgttcttgccaccaggatctatcctttgcatgacgccagccacgagtgtggtgcccatggttcacggtgcgacgccagcgactgtatctgcggctactacgtccgcaacatccgttccgtttgccgcgactgccacggcaaatcaaataccgataattagcgcagaacacttgacgagccacaaatacgtcactcaaatg

SEQ ID NO: 423 - DNA, 1875 bp, Artificial Sequence
  chemically synthesized
atggtgagcaagggcgaggaggataacatggccatcatcaaggagttcatgcgcttcaaggtgcacatggagggctccgtgaacggccacgagttcgagatcgagggcgagggcgagggccgcccctacgagggcacccagaccgccaagctgaaggtgaccaagggtggccccctgcccttcgcctgggacatcctgtcccctcagttcatgtacggctccaaggcctacgtgaagcaccccgccgacatccccgactacttgaagctgtccttccccgagggcttcaagtgggagcgcgtgatgaacttcgaggacggcggcgtggtgaccgtgacccaggactcctccctgcaggacggcgagttcatctacaaggtgaagctgcgcggcaccaacttcccctccgacggccccgtaatgcagaagaagaccatgggctgggaggcctcctccgagcggatgtaccccgaggacggcgccctgaagggcgagatcaagcagaggctgaagctgaaggacggcggccactacgacgctgaggtcaagaccacctacaaggccaagaagcccgtgcagctgcccggcgcctacaacgtcaacatcaagttggacatcacctcccacaacgaggactacaccatcgtggaacagtacgaacgcgccgagggccgccactccaccggcggcatggacgagctgtacaaggggaattcaaggcctctcgaggcagtctctgtaacaccaattagggataccaaatggctgacgctggaggtatgccgagagtttcaacgcggaacctgtagtcgccctgatacggagtgcaagtttgcccacccctctaagtcttgccaagtagagaatgggagagtcatcgcttgcttcgacagtcttaaaggccgatgttcacgggaaaactgcaaatatcttcacccgccgccacatctcaaaactcagcttgagatcaacggtcggaacaaccttatccaacagaaaaatatggctatgttggcgcagcagatgcagcttgcaaatgctatgatgcccggtgcacctttgcaaccggttccaatgttctcagtggctccatccctcgcaacaaatgcctccgcagcggcttttaacccgtacctcggccccgtatccccatcccttgtgcccgcggagatacttccgacggcacccatgttggttacaggcaatccaggggtacccgtacccgcggcagcggccgctgcggcgcaaaaacttatgcggacagatcggctcgaagtctgtagagaatatcaaaggggtaactgtaacaggggggaaaacgactgcagattcgctcacccagcggatagtacaatgatcgacacgaatgacaacaccgttaccgtatgcatggactacattaagggccgctgcagcagagagaagtgcaaatactttcacccacccgcccatctgcaagccaaaatcaaggcggctcaataccaagtcaatcaagcggcggccgctcaagccgcagccactgcggcagcaatgggtatcccgcaagccgttcttccccctctcccaaagcgaccggccctcgaaaaaaccaatggagctaccgccgtcttcaatacgggcatcttccagtaccaacaagccttggctaatatgcaacttcaacaacacacagcgttcttgccaccaggatctatcctttgcatgacgccagccacgagtgtggtgcccatggttcacggtgcgacgccagcgactgtatctgcggctactacgtccgcaacatccgttccgtttgccgcgactgccacggcaaatcaaataccgataattagcgcagaacacttgacgagccacaaatacgtcactcaaatgtag

SEQ ID NO: 424 - DNA, 5834 bp, Artificial Sequence
  chemically synthesized
ggtaccgagctcttacgcgtgctagcccgggctcgagatctgcgatctgcatctcaattagtcagcaaccatagtcccgcccctaactccgcccatcccgcccctaactccgcccagttccgcccattctccgccccatcgctgactaattttttttatttatgcagaggccgaggccgcctcggcctctgagctattccagaagtagtgaggaggcttttttggaggcctaggcttttgcaaaaagcttggcattccggtactgttggtaaagccaccatggaagacgccaaaaacataaagaaaggcccggcgccattctatccgctggaagatggaaccgctggagagcaactgcataaggctatgaagagatacgccctggttcctggaacaattgcttttacagatgcacatatcgaggtggacatcacttacgctgagtacttcgaaatgtccgttcggttggcagaagctatgaaacgatatgggctgaatacaaatcacagaatcgtcgtatgcagtgaaaactctcttcaattctttatgccggtgttgggcgcgttatttatcggagttgcagttgcgcccgcgaacgacatttataatgaacgtgaattgctcaacagtatgggcatttcgcagcctaccgtggtgttcgtttccaaaaaggggttgcaaaaaattttgaacgtgcaaaaaaagctcccaatcatccaaaaaattattatcatggattctaaaacggattaccagggatttcagtcgatgtacacgttcgtcacatctcatctacctcccggttttaatgaatacgattttgtgccagagtccttcgatagggacaagacaattgcactgatcatgaactcctctggatctactggtctgcctaaaggtgtcgctctgcctcatagaactgcctgcgtgagattctcgcatgccagagatcctatttttggcaatcaaatcattccggatactgcgattttaagtgttgttccattccatcacggttttggaatgtttactacactcggatatttgatatgtggatttcgagtcgtcttaatgtatagatttgaagaagagctgtttctgaggagccttcaggattacaagattcaaagtgcgctgctggtgccaaccctattctccttcttcgccaaaagcactctgattgacaaatacgatttatctaatttacacgaaattgcttctggtggcgctcccctctctaaggaagtcggggaagcggttgccaagaggttccatctgccaggtatcaggcaaggatatgggctcactgagactacatcagctattctgattacacccgagggggatgataaaccgggcgcggtcggtaaagttgttccattttttgaagcgaaggttgtggatctggataccgggaaaacgctgggcgttaatcaaagaggcgaactgtgtgtgagaggtcctatgattatgtccggttatgtaaacaatccggaagcgaccaacgccttgattgacaaggatggatggctacattctggagacatagcttactgggacgaagacgaacacttcttcatcgttgaccgcctgaagtctctgattaagtacaaaggctatcaggtggctcccgctgaattggaatccatcttgctccaacaccccaacatcttcgacgcaggtgtcgcaggtcttcccgacgatgacgccggtgaacttcccgccgccgttgttgttttggagcacggaaagacgatgacggaaaaagagatcgtggattacgtcgccagtcaagtaacaaccgcgaaaaagttgcgcggaggagttgtgtttgtggacgaagtaccgaaaggtcttaccggaaaactcgacgcaagaaaaatcagagagatcctcataaaggccaagaagggcggaaagatcgccgtgtaattctagccgcccaggagccgcccgcgctccctgaaccctagaactgtcttcgactccggggccccgttggaagactgagtgcccggggcacggcacagaagccgcgcccaccgcctgccagttcacaaccgctccgagcgtgggtctccgcccagctccagtcctgtgatccgggcccgccccctagcggccggggagggaggggccgggtccgcggccggcgaacggggctcgaagggtccttgtagccgggaatgtcgactgctgctgctgctgctgctgctgctgctgctgctgtcgacgggggatcacagaccatttctttctttcggccaggctgaggccctgacgtggatgggcaaactgcaggcctgggaaggcagcaagccgggccgtccgtgttccatcctccacgcacccccacctatcgttggttcgcaaagtgcaaagctttcttgtgcatgacgccctgctctggggagcgtctggcgcgatctctgcctgcttactcgggaaatttgcttttgccaaacccgctttttcggggatcccgcgcccccctcctcacttgcgctgctctcggagccccagccggctccgcccgcttcggcggtttggatatttattgacctcgtcctccgactcgctgacaggctacaggacccccaacaaccccaatccacgttttggatgcactgagaccccgacattcctcggtatttattgtctgtccccacctaggacccccacccccgaccctcgcgaataaaaggccctccatctgcccaaagctctggactccacagtgtccgcggtttgcgttgtgggccggagctccgcagcgggccaatccggaggcgtgtggaggcggccgaaggtctgggaggagctagcgggatgcgaagcggccgaatcagggttgggggaggaaaagccacggggcggggctttggcgtccggccaataggagggcgagcgggccacccggaggcaccgcccccgcccagctgtggcccagctgtgccaccgagcgtcgagaagagggggctgggctggcagcgcgcgcggccatcctccttccactgcgcctgcgctcgaccgatgcccttgagagccttcaacccagtcagctccttccggtgggcgcggggcatgactatcgtcgccgcacttatgactgtcttctttatcatgcaactcgtaggacaggtgccggcagcgctcttccgcttcctcgctcactgactcgctgcgctcggtcgttcggctgcggcgagcggtatcagctcactcaaaggcggtaatacggttatccacagaatcaggggataacgcaggaaagaacatgtgagcaaaaggccagcaaaaggccaggaaccgtaaaaaggccgcgttgctggcgtttttccataggctccgcccccctgacgagcatcacaaaaatcgacgctcaagtcagaggtggcgaaacccgacaggactataaagataccaggcgtttccccctggaagctccctcgtgcgctctcctgttccgaccctgccgcttaccggatacctgtccgcctttctcccttcgggaagcgtggcgctttctcatagctcacgctgtaggtatctcagttcggtgtaggtcgttcgctccaagctgggctgtgtgcacgaaccccccgttcagcccgaccgctgcgccttatccggtaactatcgtcttgagtccaacccggtaagacacgacttatcgccactggcagcagccactggtaacaggattagcagagcgaggtatgtaggcggtgctacagagttcttgaagtggtggcctaactacggctacactagaagaacagtatttggtatctgcgctctgctgaagccagttaccttcggaaaaagagttggtagctcttgatccggcaaacaaaccaccgctggtagcggtggtttttttgtttgcaagcagcagattacgcgcagaaaaaaaggatctcaagaagatcctttgatcttttctacggggtctgacgctcagtggaacgaaaactcacgttaagggattttggtcatgagattatcaaaaaggatcttcacctagatccttttaaattaaaaatgaagttttaaatcaatctaaagtatatatgagtaaacttggtctgacagttaccaatgcttaatcagtgaggcacctatctcagcgatctgtctatttcgttcatccatagttgcctgactccccgtcgtgtagataactacgatacgggagggcttaccatctggccccagtgctgcaatgataccgcgagacccacgctcaccggctccagatttatcagcaataaaccagccagccggaagggccgagcgcagaagtggtcctgcaactttatccgcctccatccagtctattaattgttgccgggaagctagagtaagtagttcgccagttaatagtttgcgcaacgttgttgccattgctacaggcatcgtggtgtcacgctcgtcgtttggtatggcttcattcagctccggttcccaacgatcaaggcgagttacatgatcccccatgttgtgcaaaaaagcggttagctccttcggtcctccgatcgttgtcagaagtaagttggccgcagtgttatcactcatggttatggcagcactgcataattctcttactgtcatgccatccgtaagatgcttttctgtgactggtgagtactcaaccaagtcattctgagaatagtgtatgcggcgaccgagttgctcttgcccggcgtcaatacgggataataccgcgccacatagcagaactttaaaagtgctcatcattggaaaacgttcttcggggcgaaaactctcaaggatcttaccgctgttgagatccagttcgatgtaacccactcgtgcacccaactgatcttcagcatcttttactttcaccagcgtttctgggtgagcaaaaacaggaaggcaaaatgccgcaaaaaagggaataagggcgacacggaaatgttgaatactcatactcttcctttttcaatattattgaagcatttatcagggttattgtctcatgagcggatacatatttgaatgtatttagaaaaataaacaaataggggttccgcgcacatttccccgaaaagtgccacctgacgcgccctgtagcggcgcattaagcgcggcgggtgtggtggttacgcgcagcgtgaccgctacacttgccagcgccctagcgcccgctcctttcgctttcttcccttcctttctcgccacgttcgccggctttccccgtcaagctctaaatcgggggctccctttagggttccgatttagtgctttacggcacctcgaccccaaaaaacttgattagggtgatggttcacgtagtgggccatcgccctgatagacggtttttcgccctttgacgttggagtccacgttctttaatagtggactcttgttccaaactggaacaacactcaaccctatctcggtctattcttttgatttataagggattttgccgatttcggcctattggttaaaaaatgagctgatttaacaaaaatttaacgcgaattttaacaaaatattaacgcttacaatttgccattcgccattcaggctgcgcaactgttgggaagggcgatcggtgcgggcctcttcgctattacgccagcccaagctaccatgataagtaagtaatattaaggtacgggaggtacttggagcggccgcaataaaatatctttattttcattacatctgtgtgttggttttttgtgtgaatcgatagtactaacatacgctctccatcaaaacaaaacgaaacaaaacaaactagcaaaataggctgtccccagtgcaagtgcaggtgccagaacatttctctatcgata

SEQ ID NO: 425 - DNA, 8917 bp, Artificial Sequence
  chemically synthesized
ggtaccgagctcttacgcgtgctagcccgggctcgagatctgcgatctgcatctcaattagtcagcaaccatagtcccgcccctaactccgcccatcccgcccctaactccgcccagttccgcccattctccgccccatcgctgactaattttttttatttatgcagaggccgaggccgcctcggcctctgagctattccagaagtagtgaggaggcttttttggaggcctaggcttttgcaaaaagcttggcattccggtactgttggtaaagccaccatggaagacgccaaaaacataaagaaaggcccggcgccattctatccgctggaagatggaaccgctggagagcaactgcataaggctatgaagagatacgccctggttcctggaacaattgcttttacagatgcacatatcgaggtggacatcacttacgctgagtacttcgaaatgtccgttcggttggcagaagctatgaaacgatatgggctgaatacaaatcacagaatcgtcgtatgcagtgaaaactctcttcaattctttatgccggtgttgggcgcgttatttatcggagttgcagttgcgcccgcgaacgacatttataatgaacgtgaattgctcaacagtatgggcatttcgcagcctaccgtggtgttcgtttccaaaaaggggttgcaaaaaattttgaacgtgcaaaaaaagctcccaatcatccaaaaaattattatcatggattctaaaacggattaccagggatttcagtcgatgtacacgttcgtcacatctcatctacctcccggttttaatgaatacgattttgtgccagagtccttcgatagggacaagacaattgcactgatcatgaactcctctggatctactggtctgcctaaaggtgtcgctctgcctcatagaactgcctgcgtgagattctcgcatgccagagatcctatttttggcaatcaaatcattccggatactgcgattttaagtgttgttccattccatcacggttttggaatgtttactacactcggatatttgatatgtggatttcgagtcgtcttaatgtatagatttgaagaagagctgtttctgaggagccttcaggattacaagattcaaagtgcgctgctggtgccaaccctattctccttcttcgccaaaagcactctgattgacaaatacgatttatctaatttacacgaaattgcttctggtggcgctcccctctctaaggaagtcggggaagcggttgccaagaggttccatctgccaggtatcaggcaaggatatgggctcactgagactacatcagctattctgattacacccgagggggatgataaaccgggcgcggtcggtaaagttgttccattttttgaagcgaaggttgtggatctggataccgggaaaacgctgggcgttaatcaaagaggcgaactgtgtgtgagaggtcctatgattatgtccggttatgtaaacaatccggaagcgaccaacgccttgattgacaaggatggatggctacattctggagacatagcttactgggacgaagacgaacacttcttcatcgttgaccgcctgaagtctctgattaagtacaaaggctatcaggtggctcccgctgaattggaatccatcttgctccaacaccccaacatcttcgacgcaggtgtcgcaggtcttcccgacgatgacgccggtgaacttcccgccgccgttgttgttttggagcacggaaagacgatgacggaaaaagagatcgtggattacgtcgccagtcaagtaacaaccgcgaaaaagttgcgcggaggagttgtgtttgtggacgaagtaccgaaaggtcttaccggaaaactcgacgcaagaaaaatcagagagatcctcataaaggccaagaagggcggaaagatcgccgtgtaattctaggcgccgcccaggagccgcccgcgctccctgaaccctagaactgtcttcgactccggggccccgttggaagactgagtgcccggggcacggcacagaagccgcgcccaccgcctgccagttcacaaccgctccgagcgtgggtctccgcccagctccagtcctgtgatccgggcccgccccctagcggccggggagggaggggccgggtccgcggccggcgaacggggctcgaagggtccttgtagccgggaatgtcgactgctgctgctgctgctgctgctgctgctgctgctgctgctgctgctgctgctgctgctgctcgactgctgctgctgctgctgctgctgctgctgctgctgctgctgctgctgctgctgctgctgctcgactgctgctgctgctgctgctgctgctgctgctgctgctgctgctgctgctgctgctgctgctcgactgctgctgctgctgctgctgctgctgctgctgctgctgctgctgctgctgctgctgctgctcgactgctgctgctgctgctgctgctgctgctgctgctgctgctgctgctgctgctgctgctgctcgactgctgctgctgctgctgctgctgctgctgctgctgctgctgctgctgctgctgctgctgctcgactgctgctgctgctgctgctgctgctgctgctgctgctgctgctgctgctgctgctgctgctcgactgctgctgctgctgctgctgctgctgctgctgctgctgctgctgctgctgctgctgctgctcgactgctgctgctgctgctgctgctgctgctgctgctgctgctgctgctgctgctgctgctgctcgactgctgctgctgctgctgctgctgctgctgctgctgctgctgctgctgctgctgctgctgctcgactgctgctgctgctgctgctgctgctgctgctgctgctgctgctgctgctgctgctgctgctcgactgctgctgctgctgctgctgctgctgctgctgctgctgctgctgctgctgctgctgctgctcgactgctgctgctgctgctgctgctgctgctgctgctgctgctgctgctgctgctgctgctgctcgactgctgctgctgctgctgctgctgctgctgctgctgctgctgctgctgctgctgctgctgctcgactgctgctgctgctgctgctgctgctgctgctgctgctgctgctgctgctgctgctgctgctcgactgctgctgctgctgctgctgctgctgctgctgctgctgctgctgctgctgctgctgctgctcgactgctgctgctgctgctgctgctgctgctgctgctgctgctgctgctgctgctgctgctgctcgactgctgctgctgctgctgctgctgctgctgctgctgctgctgctgctgctgctgctgctgctcgactgctgctgctgctgctgctgctgctgctgctgctgctgctgctgctgctgctgctgctgctcgactgctgctgctgctgctgctgctgctgctgctgctgctgctgctgctgctgctgctgctgctcgactgctgctgctgctgctgctgctgctgctgctgctgctgctgctgctgctgctgctgctgctcgactgctgctgctgctgctgctgctgctgctgctgctgctgctgctgctgctgctgctgctgctcgactgctgctgctgctgctgctgctgctgctgctgctgctgctgctgctgctgctgctgctgctcgactgctgctgctgctgctgctgctgctgctgctgctgctgctgctgctgctgctgctgctgctcgactgctgctgctgctgctgctgctgctgctgctgctgctgctgctgctgctgctgctgctgctcgactgctgctgctgctgctgctgctgctgctgctgctgctgctgctgctgctgctgctgctgctcgactgctgctgctgctgctgctgctgctgctgctgctgctgctgctgctgctgctgctgctgctcgactgctgctgctgctgctgctgctgctgctgctgctgctgctgctgctgctgctgctgctgctcgactgctgctgctgctgctgctgctgctgctgctgctgctgctgctgctgctgctgctgctgctcgactgctgctgctgctgctgctgctgctgctgctgctgctgctgctgctgctgctgctgctgctcgactgctgctgctgctgctgctgctgctgctgctgctgctgctgctgctgctgctgctgctgctcgactgctgctgctgctgctgctgctgctgctgctgctgctgctgctgctgctgctgctgctgctcgactgctgctgctgctgctgctgctgctgctgctgctgctgctgctgctgctgctgctgctgctcgactgctgctgctgctgctgctgctgctgctgctgctgctgctgctgctgctgctgctgctgctcgactgctgctgctgctgctgctgctgctgctgctgctgctgctgctgctgctgctgctgctgctcgactgctgctgctgctgctgctgctgctgctgctgctgctgctgctgctgctgctgctgctgctcgactgctgctgctgctgctgctgctgctgctgctgctgctgctgctgctgctgctgctgctgctcgactgctgctgctgctgctgctgctgctgctgctgctgctgctgctgctgctgctgctgctgctcgactgctgctgctgctgctgctgctgctgctgctgctgctgctgctgctgctgctgctgctgctcgactgctgctgctgctgctgctgctgctgctgctgctgctgctgctgctgctgctgctgctgctcgactgctgctgctgctgctgctgctgctgctgctgctgctgctgctgctgctgctgctgctgctcgactgctgctgctgctgctgctgctgctgctgctgctgctgctgctgctgctgctgctgctgctcgactgctgctgctgctgctgctgctgctgctgctgctgctgctgctgctgctgctgctgctgctcgactgctgctgctgctgctgctgctgctgctgctgctgctgctgctgctgctgctgctgctgctcgactgctgctgctgctgctgctgctgctgctgctgctgctgctgctgctgctgctgctgctgctcgactgctgctgctgctgctgctgctgctgctgctgctgctgctgctgctgctgctgctgctgctcgactgctgctgctgctgctgctgctgctgctgctgctgctgctgctgctgctgctgctgctgctcgactgctgctgctgctgctgctgctgctgctgctgctgctgctgctgctgctgctgctgctgctcgacgggggatcacagaccatttctttctttcggccaggctgaggccctgacgtggatgggcaaactgcaggcctgggaaggcagcaagccgggccgtccgtgttccatcctccacgcacccccacctatcgttggttcgcaaagtgcaaagctttcttgtgcatgacgccctgctctggggagcgtctggcgcgatctctgcctgcttactcgggaaatttgcttttgccaaacccgctttttcggggatcccgcgcccccctcctcacttgcgctgctctcggagccccagccggctccgcccgcttcggcggtttggatatttattgacctcgtcctccgactcgctgacaggctacaggacccccaacaaccccaatccacgttttggatgcactgagaccccgacattcctcggtatttattgtctgtccccacctaggacccccacccccgaccctcgcgaataaaaggccctccatctgcccaaagctctggactccacagtgtccgcggtttgcgttgtgggccggagctccgcagcgggccaatccggaggcgtgtggaggcggccgaaggtctgggaggagctagcgggatgcgaagcggccgaatcagggttgggggaggaaaagccacggggcggggctttggcgtccggccaataggagggcgagcgggccacccggaggcaccgcccccgcccagctgtggcccagctgtgccaccgagcgtcgagaagagggggctgggctggcagcgcgcgcggccatcctccttccactgcgcctgcgctcgaccgatgcccttgagagccttcaacccagtcagctccttccggtgggcgcggggcatgactatcgtcgccgcacttatgactgtcttctttatcatgcaactcgtaggacaggtgccggcagcgctcttccgcttcctcgctcactgactcgctgcgctcggtcgttcggctgcggcgagcggtatcagctcactcaaaggcggtaatacggttatccacagaatcaggggataacgcaggaaagaacatgtgagcaaaaggccagcaaaaggccaggaaccgtaaaaaggccgcgttgctggcgtttttccataggctccgcccccctgacgagcatcacaaaaatcgacgctcaagtcagaggtggcgaaacccgacaggactataaagataccaggcgtttccccctggaagctccctcgtgcgctctcctgttccgaccctgccgcttaccggatacctgtccgcctttctcccttcgggaagcgtggcgctttctcatagctcacgctgtaggtatctcagttcggtgtaggtcgttcgctccaagctgggctgtgtgcacgaaccccccgttcagcccgaccgctgcgccttatccggtaactatcgtcttgagtccaacccggtaagacacgacttatcgccactggcagcagccactggtaacaggattagcagagcgaggtatgtaggcggtgctacagagttcttgaagtggtggcctaactacggctacactagaagaacagtatttggtatctgcgctctgctgaagccagttaccttcggaaaaagagttggtagctcttgatccggcaaacaaaccaccgctggtagcggtggtttttttgtttgcaagcagcagattacgcgcagaaaaaaaggatctcaagaagatcctttgatcttttctacggggtctgacgctcagtggaacgaaaactcacgttaagggattttggtcatgagattatcaaaaaggatcttcacctagatccttttaaattaaaaatgaagttttaaatcaatctaaagtatatatgagtaaacttggtctgacagttaccaatgcttaatcagtgaggcacctatctcagcgatctgtctatttcgttcatccatagttgcctgactccccgtcgtgtagataactacgatacgggagggcttaccatctggccccagtgctgcaatgataccgcgagacccacgctcaccggctccagatttatcagcaataaaccagccagccggaagggccgagcgcagaagtggtcctgcaactttatccgcctccatccagtctattaattgttgccgggaagctagagtaagtagttcgccagttaatagtttgcgcaacgttgttgccattgctacaggcatcgtggtgtcacgctcgtcgtttggtatggcttcattcagctccggttcccaacgatcaaggcgagttacatgatcccccatgttgtgcaaaaaagcggttagctccttcggtcctccgatcgttgtcagaagtaagttggccgcagtgttatcactcatggttatggcagcactgcataattctcttactgtcatgccatccgtaagatgcttttctgtgactggtgagtactcaaccaagtcattctgagaatagtgtatgcggcgaccgagttgctcttgcccggcgtcaatacgggataataccgcgccacatagcagaactttaaaagtgctcatcattggaaaacgttcttcggggcgaaaactctcaaggatcttaccgctgttgagatccagttcgatgtaacccactcgtgcacccaactgatcttcagcatcttttactttcaccagcgtttctgggtgagcaaaaacaggaaggcaaaatgccgcaaaaaagggaataagggcgacacggaaatgttgaatactcatactcttcctttttcaatattattgaagcatttatcagggttattgtctcatgagcggatacatatttgaatgtatttagaaaaataaacaaataggggttccgcgcacatttccccgaaaagtgccacctgacgcgccctgtagcggcgcattaagcgcggcgggtgtggtggttacgcgcagcgtgaccgctacacttgccagcgccctagcgcccgctcctttcgctttcttcccttcctttctcgccacgttcgccggctttccccgtcaagctctaaatcgggggctccctttagggttccgatttagtgctttacggcacctcgaccccaaaaaacttgattagggtgatggttcacgtagtgggccatcgccctgatagacggtttttcgccctttgacgttggagtccacgttctttaatagtggactcttgttccaaactggaacaacactcaaccctatctcggtctattcttttgatttataagggattttgccgatttcggcctattggttaaaaaatgagctgatttaacaaaaatttaacgcgaattttaacaaaatattaacgcttacaatttgccattcgccattcaggctgcgcaactgttgggaagggcgatcggtgcgggcctcttcgctattacgccagcccaagctaccatgataagtaagtaatattaaggtacgggaggtacttggagcggccgcaataaaatatctttattttcattacatctgtgtgttggttttttgtgtgaatcgatagtactaacatacgctctccatcaaaacaaaacgaaacaaaacaaactagcaaaataggctgtccccagtgcaagtgcaggtgccagaacatttctctatcgata

SEQ ID NO: 426 - DNA, 4611 bp, Artificial Sequence
  chemically synthesized
gtcgacggatcgggagatctcccgatcccctatggtgcactctcagtacaatctgctctgatgccgcatagttaagccagtatctgctccctgcttgtgtgttggaggtcgctgagtagtgcgcgagcaaaatttaagctacaacaaggcaaggcttgaccgacaattgcatgaagaatctgcttagggttaggcgttttgcgctgcttcgaattcgctagctaggtcttgaaaggagtgggaattggctccggtgcccgtcagtgggcagagcgcacatcgcccacagtccccgagaagttggggggaggggtcggcaattgatccggtgcctagagaaggtggcgcggggtaaactgggaaagtgatgtcgtgtactggctccgcctttttcccgagggtgggggagaaccgtatataagtgcagtagtcgccgtgaacgttctttttcgcaacgggtttgccgccagaacacaggaccggttctagaccatgtcaagctcttcctggctccttctcagccttgttgctgtaactgctgctcagtccaccattgaggaacaggccaagacatttttggacaagtttaaccacgaagccgaagacctgttctatcaaagttcacttgcttcttggaattataacaccaatattactgaagagaatgtccaaaacatgaataatgctggggacaaatggtctgcctttttaaaggaacagtccacacttgcccaaatgtatccactacaagaaattcagaatctcacagtcaagcttcagctgcaggctcttcagcaaaatgggtcttcagtgctctcagaagacaagagcaaacggttgaacacaattctaaatacaatgagcaccatctacagtactggaaaagtttgtaacccagataatccacaagaatgcttattacttgaaccaggtttgaatgaaataatggcaaacagtttagactacaatgagaggctctgggcttgggaaagctggagatctgaggtcggcaagcagctgaggccattatatgaagagtatgtggtcttgaaaaatgagatggcaagagcaaatcattatgaggactatggggattattggagaggagactatgaagtaaatggggtagatggctatgactacagccgcggccagttgattgaagatgtggaacatacctttgaagagattaaaccattatatgaacatcttcatgcctatgtgagggcaaagttgatgaatgcctatccttcctatatcagtccaattggatgcctccctgctcatttgcttggtgatatgtggggtagattttggacaaatctgtactctttgacagttccctttggacagaaaccaaacatagatgttactgatgcaatggtggaccaggcctgggatgcacagagaatattcaaggaggccgagaagttctttgtatctgttggtcttcctaatatgactcaaggattctgggaaaattccatgctaacggacccaggaaatgttcagaaagcagtctgccatcccacagcttgggacctggggaagggcgacttcaggatccttatgtgcacaaaggtgacaatggacgacttcctgacagctcatcatgagatggggcatatccagtatgatatggcatatgctgcacaaccttttctgctaagaaatggagctaatgaaggattccatgaagctgttggggaaatcatgtcactttctgcagccacacctaagcatttaaaatccattggtcttctgtcacccgattttcaagaagacaatgaaacagaaataaacttcctgctcaaacaagcactcacgattgttgggactctgccatttacttacatgttagagaagtggaggtggatggtctttaaaggggaaattcccaaagaccagtggatgaaaaagtggtgggagatgaagcgagagatagttggggtggtggaacctgtgccccatgatgaaacatactgtgaccccgcatctctgttccatgtttctaatgattactcattcattcgatattacacaaggaccctttaccaattccagtttcaagaagcactttgtcaagcagctaaacatgaaggccctctgcacaaatgtgacatctcaaactctacagaagctggacagaaactgttcaatatgctgaggcttggaaaatcagaaccctggaccctagcattggaaaatgttgtaggagcaaagaacatgaatgtaaggccactgctcaactactttgagcccttatttacctggctgaaagaccagaacaagaattcttttgtgggatggagtaccgactggagtccatatgcagaccaaagcatcaaagtgaggataagcctaaaatcagctcttggagataaagcatatgaatggaacgacaatgaaatgtacctgttccgatcatctgttgcatatgctatgaggcagtactttttaaaagtaaaaaatcagatgattctttttggggaggaggatgtgcgagtggctaatttgaaaccaagaatctcctttaatttctttgtcactgcacctaaaaatgtgtctgatatcattcctagaactgaagttgaaaaggccatcaggatgtcccggagccgtatcaatgatgctttccgtctgaatgacaacagcctagagtttctggggatacagccaacacttggacctcctaaccagccccctgtttccatatggctgattgtttttggagttgtgatgggagtgatagtggttggcattgtcatcctgatcttcactgggatcagagatcggaagaagaaaaataaagcaagaagtggagaaaatccttatgcctccatcgatattagcaaaggagaaaataatccaggattccaaaacactgatgatgttcagacctcctttggtaccgagacctcccaggtggcgcccgcttaagcttggatccgcgttaagtttaaaccgctgatcagcctcgactgtgccttctagttgccagccatctgttgtttgcccctcccccgtgccttccttgaccctggaaggtgccactcccactgtcctttcctaataaaatgaggaaattgcatcgcattgtctgagtaggtgtcattctattctggggggtggggtggggcaggacagcaagggggaggattgggaagacaatagcaggcatgctggggatgcggtgggctctatggcttctgaggcggaaagaaccagctggggctctagggggtatccccacgcgccctgtagcggcgcattaagcgcggcgggtgtggtggttacgcgcagcgtgaccgctacacttgccagcgccctagcgcccgctcctttcgctttcttcccttcctttctcgccacgttcgccggctttccccgtcaagctctaaatcgggggctccctttagggttccgatttagtgctttacggcacctcgaccccaaaaaacttgattagggtgatggttcacgtagtgggccatcgccctgatagacggtttttcgccctttgacgttggagtccacgttctttaatagtggactcttgttccaaactggaacaacactcaaccctatctcggtctattcttttgatttataagggattttgccgatttcggcctattggttaaaaaatgagctgatttaacaaaaatttaacgcgaattaattctgtggaatgtgtgtcagttagggtgtggaaagtccccaggctccccagcaggcagaagtatgcaaagcatgcatctcaattagtcagcaaccaggtgtggaaagtccccaggctccccagcaggcagaagtatgcaaagcatgcatctcaattagtcagcaaccatagtcccgcccctaactccgcccatcccgcccctaactccgcccagttccgcccattctccgccccatggctgactaattttttttatttatgcagaggccgaggccgcctctgcctctgagctattccagaagtagtgaggaggcttttttggaggcctaggcttttgcaaaaagctcccgggagcttgtatatccgccaccatggccaagcctttgtctcaagaagaatccaccctcattgaaagagcaacggctacaatcaacagcatccccatctctgaagactacagcgtcgccagcgcagctctctctagcgacggccgcatcttcactggtgtcaatgtatatcattttactgggggaccttgtgcagaactcgtggtgctgggcactgctgctgctgcggcagctggcaacctgacttgtatcgtcgcgatcggaaatgagaacaggggcatcttgagcccctgcggacggtgtcggcaggtgcttctcgatctgcatcctgggatcaaagcgatagtgaaggacagtgatggacagccgacggcagttgggattcgtgaattgctgccctctggttatgtgtgggagggctaataggcgggactctgggaacttgtttattgcagcttataatggttacaaataaagcaatagcatcacaaatttcacaaataaagcatttttttcactgcattctagttgtggtttgtccaaactcatcaatgtatcttatcatgtctgtataccgtcgac

SEQ ID NO: 427 - protein, 34 aa, Artificial Sequence
  chemically synthesized
KKRNSNEYRLVPTKWQDYKKPGPNQKYTSDGKKR

SEQ ID NO: 428 - protein, 36 aa, Artificial Sequence
  chemically synthesized
KKRLHLIIADAELETVPPEILDHPAIVNYAKRRKKR

SEQ ID NO: 429 - protein, 29 aa, Artificial Sequence
  chemically synthesized
KKRIEELEIELGLRAPPKKEKKGKKSKKR

SEQ ID NO: 430 - protein, 26 aa, Artificial Sequence
  chemically synthesized
KKRALKYRLNPKLLKENNKKDVNKKR

SEQ ID NO: 431 - protein, 26 aa, Artificial Sequence
  chemically synthesized
KKRNFLESIEISINLKDVDLSDPKKR

SEQ ID NO: 432 - protein, 30 aa, Artificial Sequence
  chemically synthesized
KKRSEKSMALRLAGELSEAAEGRGGAMKKR

SEQ ID NO: 433 - protein, 30 aa, Artificial Sequence
  chemically synthesized
KKRFKLTGTGKIKRKHAFKSHILTKKSKKR

SEQ ID NO: 434 - protein, 30 aa, Artificial Sequence
  chemically synthesized
KKRNEHTMEERLAGELADAVNGRGTAVKKR

SEQ ID NO: 435 - protein, 30 aa, Artificial Sequence; identical to SEQ ID NO: 432
  chemically synthesized

SEQ ID NO: 436 - protein, 30 aa, Artificial Sequence
  chemically synthesized
KKRGEKSMSLRLANELMEATEGRGGAMKKR

SEQ ID NO: 437 - protein, 46 aa, Artificial Sequence
  chemically synthesized
KKRLATHNAGKGAKYTRYRLPVSLLYYEVFDSKEAAMSAEALFKKR

SEQ ID NO: 438 - protein, 30 aa, Artificial Sequence; identical to SEQ ID NO: 432
  chemically synthesized

SEQ ID NO: 439 - protein, 30 aa, Artificial Sequence; identical to SEQ ID NO: 432
  chemically synthesized

SEQ ID NO: 440 - protein, 30 aa, Artificial Sequence; identical to SEQ ID NO: 432
  chemically synthesized

SEQ ID NO: 441 - protein, 30 aa, Artificial Sequence; identical to SEQ ID NO: 432
  chemically synthesized

SEQ ID NO: 442 - protein, 30 aa, Artificial Sequence; identical to SEQ ID NO: 432
  chemically synthesized

SEQ ID NO: 443 - protein, 30 aa, Artificial Sequence
  chemically synthesized
KKRGEKSMAQRLANELLEAAEGRGGAMKKR

SEQ ID NO: 444 - protein, 30 aa, Artificial Sequence
  chemically synthesized
KKRFKVTGSGKIKRKHAFKSHILTKKSKKR

SEQ ID NO: 445 - protein, 44 aa, Artificial Sequence
  chemically synthesized
KKRKKYLKAAKGYRGALSRRYKLAKQMYVRSKWYSYVGRKLKKR

SEQ ID NO: 446 - protein, 30 aa, Artificial Sequence; identical to SEQ ID NO: 444
  chemically synthesized

SEQ ID NO: 447 - protein, 44 aa, Artificial Sequence
  chemically synthesized
KKRKKIMKAVKGYRGALSRRYRLAKQAYIKAKKHAYVGRKLKKR

SEQ ID NO: 448 - protein, 32 aa, Artificial Sequence
  chemically synthesized
KKRGYQTHGIRPRLAKKKTVMSKIARKQGKKR

SEQ ID NO: 449 - protein, 45 aa, Artificial Sequence
  chemically synthesized
KKRREKFLKSAKGYRGAIKRRYRLAKQHYYRAKWYAYAGRKLKKR

SEQ ID NO: 450 - protein, 37 aa, Artificial Sequence
  chemically synthesized
KKRIGLIFGGYSNEHEVSISSAKTVFQAFNSEINKKR

SEQ ID NO: 451 - protein, 30 aa, Artificial Sequence; identical to SEQ ID NO: 432
  chemically synthesized

SEQ ID NO: 452 - protein, 30 aa, Artificial Sequence
  chemically synthesized
KKRGEKSMDLRLAGELIDASEGRGAAMKKR

SEQ ID NO: 453 - protein, 46 aa, Artificial Sequence
  chemically synthesized
KKRFSFHALHLRLSPRLLKSEKAQRHTKEYTARLYRAFMRSVEKKR

SEQ ID NO: 454 - protein, 30 aa, Artificial Sequence
  chemically synthesized
KKRNEKTMEERLAKEILDASQGTGAAVKKR

SEQ ID NO: 455 - protein, 46 aa, Artificial Sequence
  chemically synthesized
KKRAMELGIDVITPKNINDEEVFDLLDKLNPDFIVVVAYGQLIKKR

SEQ ID NO: 456 - protein, 30 aa, Artificial Sequence; identical to SEQ ID NO: 432
  chemically synthesized

SEQ ID NO: 457 - protein, 44 aa, Artificial Sequence
  chemically synthesized
KKRKKYLKAAKGYRGALSRRYKLAKQMYVRSKWYSYVGRKQKKR

SEQ ID NO: 458 - protein, 42 aa, Artificial Sequence
  chemically synthesized
KKRRAILEAASGYRGQRSRLYRKAKEQVTHSLVYNYNDRKKR

SEQ ID NO: 459 - protein, 30 aa, Artificial Sequence; identical to SEQ ID NO: 443
  chemically synthesized

SEQ ID NO: 460 - protein, 30 aa, Artificial Sequence; identical to SEQ ID NO: 432
  chemically synthesized

SEQ ID NO: 461 - protein, 30 aa, Artificial Sequence; identical to SEQ ID NO: 432
  chemically synthesized

SEQ ID NO: 462 - protein, 30 aa, Artificial Sequence; identical to SEQ ID NO: 432
  chemically synthesized

SEQ ID NO: 463 - protein, 30 aa, Artificial Sequence
  chemically synthesized
KKRSEKSMALRLAGELLEASEGRGGAMKKR

SEQ ID NO: 464 - protein, 29 aa, Artificial Sequence
  chemically synthesized
KKRMKSIGTVEVPQEAFLAILKTDTSKKR

SEQ ID NO: 465 - protein, 30 aa, Artificial Sequence
  chemically synthesized
KKRSEKSMALRLAGELLEAAEGRGGAMKKR

SEQ ID NO: 466 - protein, 30 aa, Artificial Sequence; identical to SEQ ID NO: 432
  chemically synthesized

SEQ ID NO: 467 - protein, 42 aa, Artificial Sequence
  chemically synthesized
KKRILNKAKGYWGSRGTILTVAKHAVDKAEQYAYRDRRVKKR

SEQ ID NO: 468 - protein, 44 aa, Artificial Sequence
  chemically synthesized
KKRRKILKAVKGYHGALSRRYRLAKQAYIKAKKHAYVGRKLKKR

SEQ ID NO: 469 - protein, 26 aa, Artificial Sequence
  chemically synthesized
KKRGIGVKVNNGILWLLELQPEGKKR

SEQ ID NO: 470 - protein, 44 aa, Artificial Sequence
  chemically synthesized
KKRKKFLKEAKGYRGALSRRYKLAKQMYIRSKWYSYVGRKIKKR

SEQ ID NO: 471 - protein, 32 aa, Artificial Sequence
  chemically synthesized
KKRFSVTGSGKVRRLKAYKSHILTKMSGKKKR

SEQ ID NO: 472 - protein, 43 aa, Artificial Sequence
  chemically synthesized
KKRKYLKAAKGYRGALSRRYRLAKQYYIRSGVYAYVGRKQKKR

SEQ ID NO: 473 - protein, 42 aa, Artificial Sequence
  chemically synthesized
KKRRAILEQASGYRGQRSRLYRKAKEQVTHSLVYNYNDRKKR

SEQ ID NO: 474 - protein, 46 aa, Artificial Sequence; identical to SEQ ID NO: 437
  chemically synthesized

SEQ ID NO: 475 - protein, 46 aa, Artificial Sequence; identical to SEQ ID NO: 437
  chemically synthesized

SEQ ID NO: 476 - protein, 27 aa, Artificial Sequence
  chemically synthesized
KKRIPNTVFIFLVPPEKKALYDRLKKR

SEQ ID NO: 477 - protein, 46 aa, Artificial Sequence; identical to SEQ ID NO: 437
  chemically synthesized

SEQ ID NO: 478 - protein, 40 aa, Artificial Sequence
  chemically synthesized
KKRILDTLFTRSPKNQQDFIEHTDDKKSIVNFFVGAFKKR

SEQ ID NO: 479 - protein, 26 aa, Artificial Sequence
  chemically synthesized
KKRELQELNQIRRNLEQSNASLLKKR

SEQ ID NO: 480 - protein, 37 aa, Artificial Sequence
  chemically synthesized
KKRNHMAWVWGIVGLIQAPMPLICYYFFVIRPDRKKR

SEQ ID NO: 481 - protein, 40 aa, Artificial Sequence
  chemically synthesized
KKRLFEEQQEAKKIDYANSRIKAIKLIGAIIFFMKSSKKR

SEQ ID NO: 482 - protein, 28 aa, Artificial Sequence
  chemically synthesized
KKRKKIPGLAMIVIGNNPASLIYVNKKR

SEQ ID NO: 483 - protein, 27 aa, Artificial Sequence
  chemically synthesized
KKRPELLIAFGGCMAQLPEVRQKLKKR

SEQ ID NO: 484 - protein, 30 aa, Artificial Sequence; identical to SEQ ID NO: 432
  chemically synthesized

SEQ ID NO: 485 - protein, 30 aa, Artificial Sequence; identical to SEQ ID NO: 463
  chemically synthesized

SEQ ID NO: 486 - protein, 32 aa, Artificial Sequence
  chemically synthesized
KKRGYQKYGVRPRLAKKKTVMCKIARKQGKKR

SEQ ID NO: 487 - protein, 31 aa, Artificial Sequence
  chemically synthesized
KKRSSHSKKQRGNKSRGFDQKSQRVSKGKKR

SEQ ID NO: 488 - protein, 32 aa, Artificial Sequence; identical to SEQ ID NO: 486
  chemically synthesized

SEQ ID NO: 489 - protein, 31 aa, Artificial Sequence
  chemically synthesized
KKRSSHSKKQRGNKSRGFDQKSQRSSKGKKR

SEQ ID NO: 490 - protein, 30 aa, Artificial Sequence; identical to SEQ ID NO: 436
  chemically synthesized

SEQ ID NO: 491 - protein, 30 aa, Artificial Sequence; identical to SEQ ID NO: 432
  chemically synthesized

SEQ ID NO: 492 - protein, 44 aa, Artificial Sequence
  chemically synthesized
KKRRKLLKEARGYRGTKHTSYKRAKEQVWKSGVYAYVGRKQKKR

SEQ ID NO: 493 - protein, 30 aa, Artificial Sequence; identical to SEQ ID NO: 432
  chemically synthesized

SEQ ID NO: 494 - protein, 46 aa, Artificial Sequence; identical to SEQ ID NO: 437
  chemically synthesized

SEQ ID NO: 495 - protein, 46 aa, Artificial Sequence; identical to SEQ ID NO: 437
  chemically synthesized

SEQ ID NO: 496 - protein, 46 aa, Artificial Sequence; identical to SEQ ID NO: 437
  chemically synthesized

SEQ ID NO: 497 - protein, 46 aa, Artificial Sequence; identical to SEQ ID NO: 437
  chemically synthesized

SEQ ID NO: 498 - protein, 30 aa, Artificial Sequence; identical to SEQ ID NO: 465
  chemically synthesized

SEQ ID NO: 499 - protein, 30 aa, Artificial Sequence; identical to SEQ ID NO: 452
  chemically synthesized

SEQ ID NO: 500 - protein, 27 aa, Artificial Sequence
  chemically synthesized
KKRMPNTVFIFLVPPKKKDLYDRLKKR

SEQ ID NO: 501 - protein, 30 aa, Artificial Sequence; identical to SEQ ID NO: 432
  chemically synthesized

SEQ ID NO: 502 - protein, 30 aa, Artificial Sequence; identical to SEQ ID NO: 432
  chemically synthesized

SEQ ID NO: 503 - protein, 30 aa, Artificial Sequence; identical to SEQ ID NO: 432
  chemically synthesized

SEQ ID NO: 504 - protein, 45 aa, Artificial Sequence
  chemically synthesized
KKRKGMSNKKVLTGVVVATKCDKTIKVMVSRMVRHKTYKKIVKKR

SEQ ID NO: 505 - protein, 30 aa, Artificial Sequence; identical to SEQ ID NO: 463
  chemically synthesized

SEQ ID NO: 506 - protein, 46 aa, Artificial Sequence; identical to SEQ ID NO: 437
  chemically synthesized

SEQ ID NO: 507 - protein, 40 aa, Artificial Sequence
  chemically synthesized
KKRILDTFFKRNNSNHKDFVEHEEKRKSLLKIAINAFKKR

SEQ ID NO: 508 - protein, 44 aa, Artificial Sequence
  chemically synthesized
KKRDNTRLIHYEGTTRRGESYYVDVFSLMYPKMDILLEYASKKR

SEQ ID NO: 509 - protein, 30 aa, Artificial Sequence
  chemically synthesized
KKRFALTGTGKIKRKHAFHSHILTKKSKKR

SEQ ID NO: 510 - protein, 41 aa, Artificial Sequence
  chemically synthesized
KKRATVRIQGQTYKVVSSEEPAHVKEVASYMNKKMEELKKR

SEQ ID NO: 511 - protein, 46 aa, Artificial Sequence; identical to SEQ ID NO: 437
  chemically synthesized

SEQ ID NO: 512 - protein, 30 aa, Artificial Sequence; identical to SEQ ID NO: 432
  chemically synthesized

SEQ ID NO: 513 - protein, 30 aa, Artificial Sequence; identical to SEQ ID NO: 432
  chemically synthesized

SEQ ID NO: 514 - protein, 30 aa, Artificial Sequence; identical to SEQ ID NO: 509
  chemically synthesized

SEQ ID NO: 515 - protein, 30 aa, Artificial Sequence
  chemically synthesized
KKREFETQGRKPHWRFLLPNFENDPLQKKR

SEQ ID NO: 516 - protein, 46 aa, Artificial Sequence
  chemically synthesized
KKRKIIALCGIDTRALTVLIREKGALNGIIAHDPNGNFDINTLKKR

SEQ ID NO: 517 - protein, 36 aa, Artificial Sequence
  chemically synthesized
KKRSRGVGSEGPAVFREKSTTQVDVEARKSQKDKKR

SEQ ID NO: 518 - protein, 42 aa, Artificial Sequence
  chemically synthesized
KKRLFKLAKGFVGDRKNHLRLTSGAVMRAMAYNYAHRKQKKR

SEQ ID NO: 519 - protein, 36 aa, Artificial Sequence
  chemically synthesized
KKRFERKKEASPADTPPESDSTTENASVEKKAEKKR

SEQ ID NO: 520 - protein, 27 aa, Artificial Sequence
  chemically synthesized
KKRLDKEGVMKSVKAHRFYSKPSIKKR

SEQ ID NO: 521 - protein, 45 aa, Artificial Sequence
  chemically synthesized
KKRPEQGRIAALYSDIVILADEDPRGEDSVELLEMIAAGCPEKKR

SEQ ID NO: 522 - protein, 36 aa, Artificial Sequence
  chemically synthesized
KKRSLPNLRTVRVKLEDGTTVKLRVAASTLRTMKKR

SEQ ID NO: 523 - protein, 30 aa, Artificial Sequence
  chemically synthesized
KKRFRLSAKGKAMHRQSGTSHLAKGLSKKR

SEQ ID NO: 524 - protein, 30 aa, Artificial Sequence; identical to SEQ ID NO: 452
  chemically synthesized

SEQ ID NO: 525 - protein, 30 aa, Artificial Sequence; identical to SEQ ID NO: 452
  chemically synthesized

SEQ ID NO: 526 - protein, 30 aa, Artificial Sequence; identical to SEQ ID NO: 452
  chemically synthesized

SEQ ID NO: 527 - protein, 42 aa, Artificial Sequence; identical to SEQ ID NO: 458
  chemically synthesized

SEQ ID NO: 528 - protein, 42 aa, Artificial Sequence
  chemically synthesized
KKRIQYNERLEFLGDSVLQLVITEYLFMNYKDKSEGELSKKR

SEQ ID NO: 529 - protein, 30 aa, Artificial Sequence
  chemically synthesized
KKRFTLTGTGKIKRKHAFHSHILTKKSKKR

SEQ ID NO: 530 - protein, 43 aa, Artificial Sequence
  chemically synthesized
KKRDLENCSYQASGISVVSHPKNPYVPTSHLNIRFFLAKNKKR

SEQ ID NO: 531 - protein, 26 aa, Artificial Sequence
  chemically synthesized
KKRRDFLKNNHVSFLISIHADSSKKR

SEQ ID NO: 532 - protein, 46 aa, Artificial Sequence; identical to SEQ ID NO: 437
  chemically synthesized

SEQ ID NO: 533 - protein, 32 aa, Artificial Sequence; identical to SEQ ID NO: 486
  chemically synthesized

SEQ ID NO: 534 - protein, 31 aa, Artificial Sequence
  chemically synthesized
KKRSSHSKKQRGNKSRGFDQKSQRGSKGKKR

SEQ ID NO: 535 - protein, 30 aa, Artificial Sequence; identical to SEQ ID NO: 463
  chemically synthesized

SEQ ID NO: 536 - protein, 30 aa, Artificial Sequence
  chemically synthesized
KKREIFTSIFEDKIDLKLFSFLIILIEKKR

SEQ ID NO: 537 - protein, 31 aa, Artificial Sequence
  chemically synthesized
KKRARRPGVPTRGDKKRAPRLGVPARGDKKR

SEQ ID NO: 538 - protein, 31 aa, Artificial Sequence
  chemically synthesized
KKRAPRLGVPARGDKKRARRPGVPAREDKKR

SEQ ID NO: 539 - protein, 31 aa, Artificial Sequence
  chemically synthesized
KKRARRPGVPAREDKKRAPRPGVPTRGDKKR

SEQ ID NO: 540 - protein, 31 aa, Artificial Sequence
  chemically synthesized
KKRAPRPGVPTRGDKKRAPRLGVPARGDKKR

SEQ ID NO: 541 - protein, 45 aa, Artificial Sequence
  chemically synthesized
KKRARRPGVPTRGDKKRAPRLGVPARGDKKRARRPGVPAREDKKR

SEQ ID NO: 542 - protein, 45 aa, Artificial Sequence
  chemically synthesized
KKRAPRLGVPARGDKKRARRPGVPAREDKKRAPRPGVPTRGDKKR

SEQ ID NO: 543 - protein, 45 aa, Artificial Sequence
  chemically synthesized
KKRARRPGVPAREDKKRAPRPGVPTRGDKKRAPRLGVPARGDKKR

SEQ ID NO: 544 - protein, 44 aa, Artificial Sequence; identical to SEQ ID NO: 457
  chemically synthesized

SEQ ID NO: 545 - protein, 45 aa, Artificial Sequence
  chemically synthesized
KKRTSVPDDDFVFTLSDDENDVLENGADEGDEQADEETASGSKKR

SEQ ID NO: 546 - protein, 38 aa, Artificial Sequence
  chemically synthesized
KKRAAAKDDDFVLTLSDDENDVLENGVEEDTLSSSKKR

SEQ ID NO: 547 - protein, 42 aa, Artificial Sequence
  chemically synthesized
KKRLQKQAKEEERARREAEKAAEEAAAKAEQEKKLEEQRKKR

SEQ ID NO: 548 - protein, 45 aa, Artificial Sequence
  chemically synthesized
KKRANADDDFVLTLSDDENDTLNQLEEEGEGDDGALATGSKTKKR

SEQ ID NO: 549 - protein, 44 aa, Artificial Sequence
  chemically synthesized
KKRAQETKIDSKESVKESPKQENSILKRLASSIKKQELPFTKKR

SEQ ID NO: 550 - protein, 46 aa, Artificial Sequence
  chemically synthesized
KKRSAEEEEKDLKKIMMTNKQRKLYNKMQYGINKKETRQDELAKKR

SEQ ID NO: 551 - protein, 35 aa, Artificial Sequence
  chemically synthesized
KKRKAHEERKEEKRSYKKTKSDRSAPKTKAKSKKR

SEQ ID NO: 552 - protein, 41 aa, Artificial Sequence
  chemically synthesized
KKRTIDKVDDSVEDGAEKKPEAAVKNDGETAEKPEKKHKKR

SEQ ID NO: 553 - protein, 39 aa, Artificial Sequence
  chemically synthesized
KKRKANEERKEEGKERSYKKTKADRTKLKTKAKSSSKKR

SEQ ID NO: 554 - protein, 26 aa, Artificial Sequence
  chemically synthesized
KKRAAQKKKEEEELERQKMMMSRKKR

SEQ ID NO: 555 - protein, 38 aa, Artificial Sequence
  chemically synthesized
KKRKREIERLEKMTDEEKKEEQAKEKELQDLIEQVKKR

SEQ ID NO: 556 - protein, 26 aa, Artificial Sequence
  chemically synthesized
KKRGHNSIIGHEKTNALETLKKKKKR

SEQ ID NO: 557 - protein, 43 aa, Artificial Sequence
  chemically synthesized
KKRSAKIKKATFDANKKKEVGVSDLTLLSKISDESINENLKKR

SEQ ID NO: 558 - protein, 37 aa, Artificial Sequence
  chemically synthesized
KKRKAREILDKHRKEEKELVKEGKTPYYLKKAEQKKR

SEQ ID NO: 559 - protein, 39 aa, Artificial Sequence
  chemically synthesized
KKRTHDELEQDGKEEEEKKEGEKPSSQNRAERDEPEKKR

SEQ ID NO: 560 - protein, 35 aa, Artificial Sequence
  chemically synthesized
KKRSLEDNETEIKVSRDTWNTKNMRSLEPPRSKKR

SEQ ID NO: 561 - protein, 35 aa, Artificial Sequence; identical to SEQ ID NO: 560
  chemically synthesized

SEQ ID NO: 562 - protein, 45 aa, Artificial Sequence
  chemically synthesized
KKRLPQAKRACAKCQKDNKKCDDARPCQRCIKAKTDCIDLPRKKR

SEQ ID NO: 563 - protein, 26 aa, Artificial Sequence
  chemically synthesized
KKRNSEEANDENDETNLKIPIPEKKR

SEQ ID NO: 564 - protein, 37 aa, Artificial Sequence
  chemically synthesized
KKRKVNELSQDVISLHSPKESNARKTKKNKNKKKKKR

SEQ ID NO: 565 - protein, 34 aa, Artificial Sequence
  chemically synthesized
KKRKSKSKQESSDSGVSEDDEIPLSDARNKTKKR

SEQ ID NO: 566 - protein, 45 aa, Artificial Sequence
  chemically synthesized
KKRKLKDTVSNCEFTEEDSESSFLLETIQPTKSTLRRSISPLKKR

SEQ ID NO: 567 - protein, 35 aa, Artificial Sequence
  chemically synthesized
KKRAEKKEQQKEKKKEKEKERMKAFIPPEESSKKR

SEQ ID NO: 568 - protein, 35 aa, Artificial Sequence
  chemically synthesized
KKRSANELAIDDQDTKESTDLAGTEDSAPKANKKR

SEQ ID NO: 569 - protein, 44 aa, Artificial Sequence
  chemically synthesized
KKRLTYSELFHKTQELNEELQSCLQKILEASADRNESKQDAKKR

SEQ ID NO: 570 - protein, 31 aa, Artificial Sequence
  chemically synthesized
KKRTKIQCSHFDLLVKLGQGGYGSVWLAKKR

SEQ ID NO: 571 - protein, 35 aa, Artificial Sequence
  chemically synthesized
KKRKSKLVEMTPKGLKKRKRVQIQEGSVSTNTKKR

SEQ ID NO: 572 - protein, 42 aa, Artificial Sequence
  chemically synthesized
KKRNVEEQNLIEQSITESQRIFSEKQRLEQERFNRELLEKKR

SEQ ID NO: 573 - protein, 35 aa, Artificial Sequence; identical to SEQ ID NO: 560
  chemically synthesized

SEQ ID NO: 574 - protein, 35 aa, Artificial Sequence; identical to SEQ ID NO: 560
  chemically synthesized

SEQ ID NO: 575 - protein, 35 aa, Artificial Sequence; identical to SEQ ID NO: 560
  chemically synthesized

SEQ ID NO: 576 - protein, 35 aa, Artificial Sequence; identical to SEQ ID NO: 560
  chemically synthesized

SEQ ID NO: 577 - protein, 35 aa, Artificial Sequence; identical to SEQ ID NO: 560
  chemically synthesized

SEQ ID NO: 578 - protein, 35 aa, Artificial Sequence; identical to SEQ ID NO: 560
  chemically synthesized

SEQ ID NO: 579 - protein, 35 aa, Artificial Sequence; identical to SEQ ID NO: 560
  chemically synthesized

SEQ ID NO: 580 - protein, 35 aa, Artificial Sequence; identical to SEQ ID NO: 560
  chemically synthesized

SEQ ID NO: 581 - protein, 35 aa, Artificial Sequence
  chemically synthesized
KKRSLEDNETEIEVSRDTWNNKNMRSLEPPRSKKR

SEQ ID NO: 582 - protein, 35 aa, Artificial Sequence; identical to SEQ ID NO: 581
  chemically synthesized

SEQ ID NO: 583 - protein, 40 aa, Artificial Sequence
  chemically synthesized
KKRVEKLDWMYAAPSTEGGALGGARIGERDMEEYLLGKKR

SEQ ID NO: 584 - protein, 40 aa, Artificial Sequence; identical to SEQ ID NO: 583
  chemically synthesized

SEQ ID NO: 585 - protein, 35 aa, Artificial Sequence; identical to SEQ ID NO: 581
  chemically synthesized

SEQ ID NO: 586 - protein, 35 aa, Artificial Sequence; identical to SEQ ID NO: 581
  chemically synthesized

SEQ ID NO: 587 - protein, 29 aa, Artificial Sequence
  chemically synthesized
KKRKRRSKKINKLTDGQIRINHVSSEKKR

SEQ ID NO: 588 - protein, 37 aa, Artificial Sequence
  chemically synthesized
KKRSKLTSKHAETADSQSSAASSDHESGQSQAHTKKR

SEQ ID NO: 589 - protein, 39 aa, Artificial Sequence
  chemically synthesized
KKRDAETADIGDQSEVESDTEELKKIMFGEKKKLNKKKR

SEQ ID NO: 590 - protein, 29 aa, Artificial Sequence
  chemically synthesized
KKRAGGTKRKKATAEPSDNDILSQMTKKR

SEQ ID NO: 591 - protein, 35 aa, Artificial Sequence; identical to SEQ ID NO: 581
  chemically synthesized

SEQ ID NO: 592 - protein, 33 aa, Artificial Sequence
  chemically synthesized
KKRVYYDDGLTEEQFLEAVEDDNMSLEDAIKKR

SEQ ID NO: 593 - protein, 43 aa, Artificial Sequence
  chemically synthesized
KKRSAKIKKATFDANKKKEVGISDLTLLSKISDESINENLKKR

SEQ ID NO: 594 - protein, 37 aa, Artificial Sequence
  chemically synthesized
KKRKRLESEQEQDQDEIASDSDMEDIDSDLENNSKKR

SEQ ID NO: 595 - protein, 26 aa, Artificial Sequence
  chemically synthesized
KKRGHNSIIGHEKTNALETLKKKKKR

SEQ ID NO: 596 - protein, 35 aa, Artificial Sequence; identical to SEQ ID NO: 560
  chemically synthesized

SEQ ID NO: 597 - protein, 35 aa, Artificial Sequence; identical to SEQ ID NO: 560
  chemically synthesized

SEQ ID NO: 598 - protein, 35 aa, Artificial Sequence
  chemically synthesized
KKRAHSSGERRSSVSKPARDPSDKPEESPSKKKKR

SEQ ID NO: 599 - protein, 42 aa, Artificial Sequence
  chemically synthesized
KKRLKSSLRFRKLEILLELPFFIPFEERVDLFYMFIALDKKR

SEQ ID NO: 600 - protein, 35 aa, Artificial Sequence
  chemically synthesized
KKRMQAVFTNVHKFKPDASRDESKETYYIGLKKKR

SEQ ID NO: 601 - protein, 35 aa, Artificial Sequence
  chemically synthesized
KKRKPTEVNDSENNSSEEDKKKGQNVTSETHSKKR

SEQ ID NO: 602 - protein, 42 aa, Artificial Sequence
  chemically synthesized
KKREAEAQWCRIHGQSCWKRDALPEAEPQWCRIHGQSCWKKR

SEQ ID NO: 603 - protein, 35 aa, Artificial Sequence; identical to SEQ ID NO: 560
  chemically synthesized

SEQ ID NO: 604 - protein, 35 aa, Artificial Sequence; identical to SEQ ID NO: 581
  chemically synthesized

SEQ ID NO: 605 - protein, 35 aa, Artificial Sequence; identical to SEQ ID NO: 560
  chemically synthesized

SEQ ID NO: 606 - protein, 35 aa, Artificial Sequence; identical to SEQ ID NO: 560
  chemically synthesized

SEQ ID NO: 607 - protein, 45 aa, Artificial Sequence
  chemically synthesized
KKRKDPDSDDWSESNSKENKIDNKHLNLLSSDSEIEQDYQKAKKR

SEQ ID NO: 608 - protein, 35 aa, Artificial Sequence; identical to SEQ ID NO: 560
  chemically synthesized

SEQ ID NO: 609 - protein, 35 aa, Artificial Sequence; identical to SEQ ID NO: 560
  chemically synthesized

SEQ ID NO: 610 - protein, 35 aa, Artificial Sequence
  chemically synthesized
KKRVIDDEDDKEVDTTLPGWGEWAGAGSKPKNKKR

SEQ ID NO: 611 - protein, 35 aa, Artificial Sequence; identical to SEQ ID NO: 560
  chemically synthesized

SEQ ID NO: 612 - protein, 35 aa, Artificial Sequence; identical to SEQ ID NO: 560
  chemically synthesized

SEQ ID NO: 613 - protein, 26 aa, Artificial Sequence
  chemically synthesized
KKRRRGNGKHLSRKEKRKMERADKKR

SEQ ID NO: 614 - protein, 35 aa, Artificial Sequence; identical to SEQ ID NO: 560
  chemically synthesized

SEQ ID NO: 615 - protein, 40 aa, Artificial Sequence
  chemically synthesized
KKRNGSMHNMYYASVPFLLFSNAYSIDFSRHVNEFLEKKR

SEQ ID NO: 616 - protein, 35 aa, Artificial Sequence; identical to SEQ ID NO: 581
  chemically synthesized

SEQ ID NO: 617 - protein, 35 aa, Artificial Sequence; identical to SEQ ID NO: 560
  chemically synthesized

SEQ ID NO: 618 - protein, 28 aa, Artificial Sequence
  chemically synthesized
KKRYMTTKQTRTVQNQTMPRSNTTTKKR

SEQ ID NO: 619 - protein, 37 aa, Artificial Sequence
  chemically synthesized
KKREFEAAPAKTYADFLRAYQSWNTFVNPDRPNLKKR

SEQ ID NO: 620 - protein, 37 aa, Artificial Sequence
  chemically synthesized
KKREFEAAPEKSYADFLRAYHSWNTFVNPDRPNLKKR

SEQ ID NO: 621 - protein, 37 aa, Artificial Sequence; identical to SEQ ID NO: 619
  chemically synthesized

SEQ ID NO: 622 - protein, 46 aa, Artificial Sequence
  chemically synthesized
KKRDKKKQLKLAKEEERQRREAERLAEQAAQKALEAKRQEEARKKR

SEQ ID NO: 623 - protein, 26 aa, Artificial Sequence
  chemically synthesized
KKREALLNIEEGRDVKGNRMVGMKKR

SEQ ID NO: 624 - protein, 35 aa, Artificial Sequence; identical to SEQ ID NO: 560
  chemically synthesized

SEQ ID NO: 625 - protein, 35 aa, Artificial Sequence; identical to SEQ ID NO: 560
  chemically synthesized

SEQ ID NO: 626 - protein, 35 aa, Artificial Sequence; identical to SEQ ID NO: 581
  chemically synthesized

SEQ ID NO: 627 - protein, 35 aa, Artificial Sequence; identical to SEQ ID NO: 560
  chemically synthesized

SEQ ID NO: 628 - protein, 35 aa, Artificial Sequence; identical to SEQ ID NO: 560
  chemically synthesized

SEQ ID NO: 629 - protein, 35 aa, Artificial Sequence; identical to SEQ ID NO: 560
  chemically synthesized

SEQ ID NO: 630 - protein, 35 aa, Artificial Sequence; identical to SEQ ID NO: 560
  chemically synthesized

SEQ ID NO: 631 - protein, 35 aa, Artificial Sequence; identical to SEQ ID NO: 560
  chemically synthesized

SEQ ID NO: 632 - protein, 35 aa, Artificial Sequence; identical to SEQ ID NO: 581
  chemically synthesized

SEQ ID NO: 633 - protein, 41 aa, Artificial Sequence
  chemically synthesized
KKRKLGPKAPNPLSVKKKKKVNSPSDEVKDKEDTSKEKKKR

SEQ ID NO: 634 - protein, 35 aa, Artificial Sequence; identical to SEQ ID NO: 560
  chemically synthesized

SEQ ID NO: 635 - protein, 35 aa, Artificial Sequence; identical to SEQ ID NO: 581
  chemically synthesized

SEQ ID NO: 636 - protein, 35 aa, Artificial Sequence; identical to SEQ ID NO: 560
  chemically synthesized

SEQ ID NO: 637 - protein, 35 aa, Artificial Sequence; identical to SEQ ID NO: 581
  chemically synthesized

SEQ ID NO: 638 - protein, 35 aa, Artificial Sequence; identical to SEQ ID NO: 581
  chemically synthesized

SEQ ID NO: 639 - protein, 31 aa, Artificial Sequence
  chemically synthesized
KKRKGGNGSSDEEEDSDDDMAGKDKGKRKKR

SEQ ID NO: 640 - protein, 45 aa, Artificial Sequence
  chemically synthesized
KKRKRKHGGSGNAALTSANAAKSLVKTTLSSKGEASAEKQEMKKR

SEQ ID NO: 641 - protein, 26 aa, Artificial Sequence
  chemically synthesized
KKRKADRRSDKEDDKLGKKEKKSKKR

SEQ ID NO: 642 - protein, 44 aa, Artificial Sequence
  chemically synthesized
KKRDKKEKKERRDKKEKKEKRRIEKAAAESGAETGDSISEEKKR

SEQ ID NO: 643 - protein, 46 aa, Artificial Sequence
  chemically synthesized
KKRTAPKDDDFVLTLSDDENDVFSGINEDGDDHLDEETAKSTTKKR

SEQ ID NO: 644 - protein, 42 aa, Artificial Sequence
  chemically synthesized
KKRVDEAREKRVGRFRDGMGSKKELKGREDIRKARIEKEKKR

SEQ ID NO: 645 - protein, 34 aa, Artificial Sequence
  chemically synthesized
KKRIDRVDWMYATPATTGSGSAAEMEDYLLGKKR

SEQ ID NO: 646 - protein, 34 aa, Artificial Sequence
  chemically synthesized
KKRKTSDRETQNVTTKKQKIETIERKKSSLKKKR

SEQ ID NO: 647 - protein, 45 aa, Artificial Sequence
  chemically synthesized
KKRAAARDDDFVLTLSDDENDIFENGVEEDGDNAQEDTLSSSKKR

SEQ ID NO: 648 - protein, 42 aa, Artificial Sequence; identical to SEQ ID NO: 547
  chemically synthesized

SEQ ID NO: 649 - protein, 41 aa, Artificial Sequence
  chemically synthesized
KKRLQQLAKEEERKRKEEELKAKEEEQRLQKEKLKAEQKKR

SEQ ID NO: 650 - protein, 37 aa, Artificial Sequence
  chemically synthesized
KKRSEIERYSKMFWQNYQKIEGYEKYLSQIEAVEKKR

SEQ ID NO: 651 - protein, 27 aa, Artificial Sequence
  chemically synthesized
KKRVAPLLVSTSAAPKNVLQKPLEKKR

SEQ ID NO: 652 - protein, 26 aa, Artificial Sequence
  chemically synthesized
KKRAAKKRQEEEELERQKMMMSRKKR

SEQ ID NO: 653 - protein, 46 aa, Artificial Sequence
  chemically synthesized
KKRSAEDEEKDLKKIMMSNKQRKLYKKMQYGIDKKEARQDDLTKKR

SEQ ID NO: 654 - protein, 44 aa, Artificial Sequence
  chemically synthesized
KKRGSEAVEESDSDSEESESESDDDKKSRKSSKKEKKDKKSKKR

SEQ ID NO: 655 - protein, 41 aa, Artificial Sequence
  chemically synthesized
KKRAEKSRTPLTSSTAVISDRPVASVSADTTLVGSVASKKR

SEQ ID NO: 656 - protein, 34 aa, Artificial Sequence
  chemically synthesized
KKRFSGSSVTVAMTTAAAAAARLTAFKVTKPKKR

SEQ ID NO: 657 - protein, 28 aa, Artificial Sequence
  chemically synthesized
KKREVGVSDLTLLSKVSEEAINENLKKR

SEQ ID NO: 658 - protein, 33 aa, Artificial Sequence
  chemically synthesized
KKRLKRTKVPSKIWVDNLNMEYIYAKGESIKKR

SEQ ID NO: 659 - protein, 39 aa, Artificial Sequence
  chemically synthesized
KKRYKSELDRAEAIERQLIREEEHLKSLQEKGETQAKKR

SEQ ID NO: 660 - protein, 41 aa, Artificial Sequence
  chemically synthesized
KKRKLEVKSDQQTPPATQSEINHTSSVRLEENIQGIKRKKR

SEQ ID NO: 661 - protein, 39 aa, Artificial Sequence
  chemically synthesized
KKRGQAAKEAVEVDLVDVGDYVKKATERFQHTVELHKKR

SEQ ID NO: 662 - protein, 33 aa, Artificial Sequence
  chemically synthesized
KKRQRKRRREAGSGDEEDEGVSDEVLAARAKKR

SEQ ID NO: 663 - protein, 42 aa, Artificial Sequence
  chemically synthesized
KKRVAEAKEKRIGKYKDGEGSKRELKTATDIRKARAVAEKKR

SEQ ID NO: 664 - protein, 34 aa, Artificial Sequence
  chemically synthesized
KKRDPPPRPKYEVFTDAQLSREIASYGFKPIKKR

SEQ ID NO: 665 - protein, 39 aa, Artificial Sequence
  chemically synthesized
KKRGISALMAKAKEASDVATNGYFKHWDGGVSEDDEKKR

SEQ ID NO: 666 - protein, 28 aa, Artificial Sequence
  chemically synthesized
KKRQSKRLTTRKREGMLKRARANERKKR

SEQ ID NO: 667 - protein, 27 aa, Artificial Sequence
  chemically synthesized
KKRKKKTVKELNRIRRASRISKKEKKR

SEQ ID NO: 668 - protein, 38 aa, Artificial Sequence
  chemically synthesized
KKRKKKTVKELNRIRRASRISKKEKKRIFKRYIGMKKR

SEQ ID NO: 669 - protein, 35 aa, Artificial Sequence; identical to SEQ ID NO: 560
  chemically synthesized

SEQ ID NO: 670 - protein, 41 aa, Artificial Sequence
  chemically synthesized
KKRTGSQYSYYNGGHNVESTNENKLVDASDLLANVDILKKR

SEQ ID NO: 671 - protein, 35 aa, Artificial Sequence; identical to SEQ ID NO: 560
  chemically synthesized

SEQ ID NO: 672 - protein, 35 aa, Artificial Sequence; identical to SEQ ID NO: 560
  chemically synthesized

SEQ ID NO: 673 - protein, 40 aa, Artificial Sequence
  chemically synthesized
KKRVWSREKRLLSEMAITNHSPLLNVDDYRKFREDLWKKR

SEQ ID NO: 674 - protein, 33 aa, Artificial Sequence
  chemically synthesized
KKRKRRAKAAEREAQEAEELSMELGLDENLKKR

SEQ ID NO: 675 - protein, 35 aa, Artificial Sequence
  chemically synthesized
KKRRRSSSYSPSPVKKKKKKSSKKHKRRRSFSKKR

SEQ ID NO: 676 - protein, 40 aa, Artificial Sequence
  chemically synthesized
KKRKKPKGKETFEPEDKTVKQEQINTEPLEDTVLSPTKKR

SEQ ID NO: 677 - protein, 42 aa, Artificial Sequence
  chemically synthesized
KKRKKQSQESRMPETVPQEEMPGPPLNSESGEEAPTGRDKKR

SEQ ID NO: 678 - protein, 43 aa, Artificial Sequence
  chemically synthesized
KKRKRQKGTEGMEPEEGVTVESQPQVKVEPLEEAIPLPPTKKR

SEQ ID NO: 679 - protein, 26 aa, Artificial Sequence
  chemically synthesized
KKRKLDPEIVPEEKDCGDAEGNSKKR

SEQ ID NO: 680 - protein, 46 aa, Artificial Sequence
  chemically synthesized
KKRSSIWQFFSRLFSSSSNTTKKPEPPVNLKYNAPTSHVTPSVKKR

SEQ ID NO: 681 - protein, 36 aa, Artificial Sequence
  chemically synthesized
KKRRAPPPPGSGPPVQDKASEKVSLGSQIDLQKKKR

SEQ ID NO: 682 - protein, 37 aa, Artificial Sequence
  chemically synthesized
KKRQRSESRSASEHSSSAESERSYKKSKKHKKKSKKR

SEQ ID NO: 683 - protein, 32 aa, Artificial Sequence
  chemically synthesized
KKRKALEFVTNPDIAAKKKMKKHKNKSEAKKR

SEQ ID NO: 684 - protein, 45 aa, Artificial Sequence
  chemically synthesized
KKRFRQLSILVHPDKNQDDADRAQKAFEAVDKAYKLLLDQEQKKR

SEQ ID NO: 685 - protein, 45 aa, Artificial Sequence
  chemically synthesized
KKRQQARKTASVLSKDDVAPESGDTTVKKPESKKEQTPEHGKKKR

SEQ ID NO: 686 - protein, 42 aa, Artificial Sequence
  chemically synthesized
KKRARLEEENEELRQRLIETELAKQVLQTELERPREHSLKKR

SEQ ID NO: 687 - protein, 35 aa, Artificial Sequence
  chemically synthesized
KKRRHRSKVNGLQRGRKKDRPRKHLTLNNKVQKKR

SEQ ID NO: 688 - protein, 30 aa, Artificial Sequence
  chemically synthesized
KKRRKEKKVKHKKKGKKQKHCRRHKQTKKR

SEQ ID NO: 689 - protein, 26 aa, Artificial Sequence
  chemically synthesized
KKRPRNSYKCGTNTMEREESEQTKKR

SEQ ID NO: 690 - protein, 35 aa, Artificial Sequence
  chemically synthesized
KKRQTQSESSNYDSELEKEIKSMSKIGAARTTKKR

SEQ ID NO: 691 - protein, 41 aa, Artificial Sequence
  chemically synthesized
KKRGRKPGSVVAAAAAEAKKKAVKESSIRSVQETVLPIKKR

SEQ ID NO: 692 - protein, 27 aa, Artificial Sequence
  chemically synthesized
KKRGDGFVNESRLQKIVSVIDEEIKKR

SEQ ID NO: 693 - protein, 27 aa, Artificial Sequence
  chemically synthesized
KKRKERFGIVTSSAGTGTTEDTEAKKR

SEQ ID NO: 694 - protein, 40 aa, Artificial Sequence
  chemically synthesized
KKRKREESVEQKRSKQNATKLSALLFKHKEQLRAEILKKR

SEQ ID NO: 695 - protein, 33 aa, Artificial Sequence
  chemically synthesized
KKRKEEERKKKETDQKKEAVAPVQEESDLEKKR

SEQ ID NO: 696 - protein, 43 aa, Artificial Sequence
  chemically synthesized
KKRHKSSSSSSSSSSDSDSSSDSQSSSDSSDSESATEEKSKKR

SEQ ID NO: 697 - protein, 34 aa, Artificial Sequence
  chemically synthesized
KKRKKDFQHLISSPLKKSRICDETANATSTLKKR

SEQ ID NO: 698 - protein, 37 aa, Artificial Sequence
  chemically synthesized
KKRKKDFQHLISSPLKKSRICDETANATSTLKKRKKR

SEQ ID NO: 699 - protein, 45 aa, Artificial Sequence
  chemically synthesized
KKRDQTASAPATPLVNKHRPTFTRSNTISKPYISNTLPSDAPKKR

SEQ ID NO: 700 - protein, 36 aa, Artificial Sequence
  chemically synthesized
KKRKNKSSKRKHRKYSDSDSNSESDTNSDSDDDKKR

SEQ ID NO: 701 - protein, 39 aa, Artificial Sequence
  chemically synthesized
KKRRQKEEEEATASERNDADEKHPEHAEQNIRKSKKKKR

SEQ ID NO: 702 - protein, 46 aa, Artificial Sequence
  chemically synthesized
KKRQQQEEEDLNLEDRGEETVLGGGTREAESRACSDGRSRKSKKKR

SEQ ID NO: 703 - protein, 38 aa, Artificial Sequence
  chemically synthesized
KKRIELKHDKKARAMAKRTKDNFHGYNGIPIEEKSKKR

SEQ ID NO: 704 - protein, 41 aa, Artificial Sequence
  chemically synthesized
KKRIERFYNCLQHALERETMTNLHPKIKEKNNSSYIHKKKR

SEQ ID NO: 705 - protein, 26 aa, Artificial Sequence
  chemically synthesized
KKRRKGSGSEQEGEDEEGGERKKKKR

SEQ ID NO: 706 - protein, 27 aa, Artificial Sequence
  chemically synthesized
KKRRRHPKGEEGSDDDETENGPKPKKR

SEQ ID NO: 707 - protein, 37 aa, Artificial Sequence
  chemically synthesized
KKRGGGGGRRSKKGGEFDEFVNDDTDDDLPISKKKKR

SEQ ID NO: 708 - protein, 36 aa, Artificial Sequence
  chemically synthesized
KKRTALHLACANGNSEVVSLLLDRQCQLHVFDSKKR

SEQ ID NO: 709 - protein, 39 aa, Artificial Sequence
  chemically synthesized
KKRKRKEEGEKEKKPRKKVPKQLGVVALNSHKSEKKKKR

SEQ ID NO: 710 - protein, 46 aa, Artificial Sequence
  chemically synthesized
KKRLDGIEEVEREITRGRSRKGSELTCPEDNKIKELTLEIERLKKR

SEQ ID NO: 711 - protein, 33 aa, Artificial Sequence
  chemically synthesized
KKRKKSYPDDKPLSSESSSESDYEEDVQAKKKR

SEQ ID NO: 712 - protein, 43 aa, Artificial Sequence
  chemically synthesized
KKRKALEAKKEEEEIQREMVKLRREIIERRRTVKAAWKIEKKR

SEQ ID NO: 713 - protein, 37 aa, Artificial Sequence
  chemically synthesized
KKRKRCGVCEPCQQKTNCGECTYCKNRKNSHQICKKR

SEQ ID NO: 714 - protein, 39 aa, Artificial Sequence
  chemically synthesized
KKRMEAEQEMVRMVRAATLIQALWKGYLVRSLLRSKKKR

SEQ ID NO: 715 - protein, 31 aa, Artificial Sequence
  chemically synthesized
KKRGRTPKTLISHPISAPSKTAEPLKFPKKR

SEQ ID NO: 716 - protein, 27 aa, Artificial Sequence
  chemically synthesized
KKRVGDGSVLRTIHGKEMSKIARKKKR

SEQ ID NO: 717 - protein, 35 aa, Artificial Sequence
  chemically synthesized
KKRKDEGKSRTTLPERPLTEVKAETRAEEAPEKKR

SEQ ID NO: 718 - protein, 32 aa, Artificial Sequence
  chemically synthesized
KKRKSEDGTPAEDGTPAATGGSQPPSMGRKKR

SEQ ID NO: 719 - protein, 35 aa, Artificial Sequence
  chemically synthesized
KKRKKRKSEDGTPAEDGTPAATGGSQPPSMGRKKR

SEQ ID NO: 720 - protein, 33 aa, Artificial Sequence
  chemically synthesized
KKRKKISGPNPLSCLKKKKKAPDTQSSASEKKR

SEQ ID NO: 721 - protein, 32 aa, Artificial Sequence
  chemically synthesized
KKRSREDAGDNDDTEGAIGVRNKVAGGKMKKR

SEQ ID NO: 722 - protein, 42 aa, Artificial Sequence
  chemically synthesized
KKRKGSSSQAPASKKLNKEELPVIPKGKPKSGRVWKDRSKKR

SEQ ID NO: 723 - protein, 44 aa, Artificial Sequence
  chemically synthesized
KKRSKLKHRDLEVSCEPDGFEMNFQCAPPLPSDTDQPQETVKKR

SEQ ID NO: 724 - protein, 45 aa, Artificial Sequence
  chemically synthesized
KKRRKKSAGERLKEEKPKKSKTSGASKTKGKSKLNTITPVVGKKR

SEQ ID NO: 725 - protein, 29 aa, Artificial Sequence
  chemically synthesized
KKRKKGEKQIPGEEKGRKRRRVKEDKKKR

SEQ ID NO: 726 - protein, 32 aa, Artificial Sequence
  chemically synthesized
KKREAEEKEKRVRIAKELAERERLERQQKKKR

SEQ ID NO: 727 - protein, 31 aa, Artificial Sequence
  chemically synthesized
KKRAATTVLQELKKLPPLPVVEKPKLFFKKR

SEQ ID NO: 728 - protein, 34 aa, Artificial Sequence
  chemically synthesized
KKRGLTGDSKKATKESGLISTKKRKMVEMLEKKR

SEQ ID NO: 729 - protein, 27 aa, Artificial Sequence
  chemically synthesized
KKRKREKKELKLENHQENSRNQKPKKR

SEQ ID NO: 730 - protein, 44 aa, Artificial Sequence
  chemically synthesized
KKRSYKDFLREEEEIAAQVRNSSKKKLKDSELYFLGTDTHKKKR

SEQ ID NO: 731 - protein, 34 aa, Artificial Sequence
  chemically synthesized
KKRQLLDSDEEQEEDEGRNRAPELGAPGIQKKKR

SEQ ID NO: 732 - protein, 38 aa, Artificial Sequence
  chemically synthesized
KKRGKKKHIKEEPLSEEEPCTSTAIASPEKKKKKKKKR

SEQ ID NO: 733 - protein, 39 aa, Artificial Sequence
  chemically synthesized
KKRGRPKKQPLLTVETIHEGTSTSPVSPISREFPGTKKR

SEQ ID NO: 734 - protein, 40 aa, Artificial Sequence
  chemically synthesized
KKRKGKVKKTKKKKTSNKKEKTKKSKSKNKKDAKKKAKKR

SEQ ID NO: 735 - protein, 41 aa, Artificial Sequence
  chemically synthesized
KKRKFTKEDAIYGVFNDGWGDYEDEEESKMTEEEYYKMKKR

SEQ ID NO: 736 - protein, 32 aa, Artificial Sequence
  chemically synthesized
KKRKRATTTEEPQGSRNELVALENIEGIYKKR

SEQ ID NO: 737 - protein, 38 aa, Artificial Sequence
  chemically synthesized
KKRGPKKKKYKPEAAEVEKKNEEGDTVKENPIAEAKKR

SEQ ID NO: 738 - protein, 40 aa, Artificial Sequence
  chemically synthesized
KKRINEVSTTEGAPAEKKKKVEKWLNTSSEDGEGTKKKKR

SEQ ID NO: 739 - protein, 32 aa, Artificial Sequence
  chemically synthesized
KKRNFDEIDRSSMPFPYATKRFYHLSSFDKKR

SEQ ID NO: 740 - protein, 46 aa, Artificial Sequence
  chemically synthesized
KKRKNIKLFLNIINSNEYINVNKIFHGKCIYELPFYVNKERIKKKR

SEQ ID NO: 741 - protein, 26 aa, Artificial Sequence
  chemically synthesized
KKRKAMVEELIKRGYAPDPIADWKKR

SEQ ID NO: 742 - protein, 44 aa, Artificial Sequence
  chemically synthesized
KKRRGRKPKKKDDPKMELKDEVKDLKDFVVEESTSASSSAPKKR

SEQ ID NO: 743 - protein, 32 aa, Artificial Sequence
  chemically synthesized
KKRLEKENRKIKEEDDEDSDDEDDEKAKKKKR

SEQ ID NO: 744 - protein, 44 aa, Artificial Sequence
  chemically synthesized
KKRKRGPKKKKFKPEVAGKAAETENDDVAAAPEEADPIAEAKKR

SEQ ID NO: 745 - protein, 46 aa, Artificial Sequence
  chemically synthesized
KKRKITDEKDAQHVPAEKREKVENWLKKSTEKPTSSQSDAEKKKKR

SEQ ID NO: 746 - protein, 29 aa, Artificial Sequence
  chemically synthesized
KKRDDNKDKEGSSMDKLREESRRQYLKKR

SEQ ID NO: 747 - protein, 35 aa, Artificial Sequence
  chemically synthesized
KKRVTSKSRTKRVKMFKQCQWVDADNQRDIKRKKR

SEQ ID NO: 748 - protein, 38 aa, Artificial Sequence
  chemically synthesized
KKRMTEKDISSSESSISESKSLNCSASNQNENEKRKKR

SEQ ID NO: 749 - protein, 35 aa, Artificial Sequence; identical to SEQ ID NO: 747
  chemically synthesized

SEQ ID NO: 750 - protein, 38 aa, Artificial Sequence; identical to SEQ ID NO: 748
  chemically synthesized

SEQ ID NO: 751 - protein, 35 aa, Artificial Sequence; identical to SEQ ID NO: 747
  chemically synthesized

SEQ ID NO: 752 - protein, 38 aa, Artificial Sequence; identical to SEQ ID NO: 748
  chemically synthesized

SEQ ID NO: 753 - protein, 35 aa, Artificial Sequence; identical to SEQ ID NO: 747
  chemically synthesized

SEQ ID NO: 754 - protein, 38 aa, Artificial Sequence; identical to SEQ ID NO: 748
  chemically synthesized

SEQ ID NO: 755 - protein, 34 aa, Artificial Sequence
  chemically synthesized
KKRGRPKKPKDENESDYNNTSFSDSNTDGTPKKR

SEQ ID NO: 756 - protein, 30 aa, Artificial Sequence
  chemically synthesized
KKRGRPSKASVGGKSSTAAVAAISPGIKKR

SEQ ID NO: 757 - protein, 32 aa, Artificial Sequence
  chemically synthesized
KKRANRKKANNNKKRASNNRKKANNNNNNKKR

SEQ ID NO: 758 - protein, 41 aa, Artificial Sequence
  chemically synthesized
KKRDWYIQPTCARSGDGLYQGLDWLSDYIFDKKNKKKGKKR

SEQ ID NO: 759 - protein, 35 aa, Artificial Sequence
  chemically synthesized
KKRHLEDSLDMLNEEIVKLRAAEEIRLTDQEDKKR

SEQ ID NO: 760 - protein, 35 aa, Artificial Sequence
  chemically synthesized
KKRNNVFLTITDVIGRVVVSQSAGSCKITTKKKKR

SEQ ID NO: 761 - protein, 44 aa, Artificial Sequence
  chemically synthesized
KKRYYLFFSKKRNNVFLTITDVIGRVVVSQSAGSCKITTKKKKR

SEQ ID NO: 762 - protein, 37 aa, Artificial Sequence
  chemically synthesized
KKREIEIQQQLELQEETTLEIRERNVSLEQEVELKKR

SEQ ID NO: 763 - protein, 43 aa, Artificial Sequence
  chemically synthesized
KKRWFILKGGDLSYYKTKGELVPLGVIHLNTSGHIKNSDRKKR

SEQ ID NO: 764 - protein, 45 aa, Artificial Sequence
  chemically synthesized
KKRPNRLIIDQSDNDDNSMVMLSQAKMDELGLFRGDSVILKGKKR

SEQ ID NO: 765 - protein, 31 aa, Artificial Sequence
  chemically synthesized
KKRKGKGKKRGKGRRRGSKGRKKKKGKGKKR

SEQ ID NO: 766 - protein, 35 aa, Artificial Sequence
  chemically synthesized
KKRARSPSKKARRRSRSTKKTAAKRRKRSSSPKKR

SEQ ID NO: 767 - protein, 26 aa, Artificial Sequence
  chemically synthesized
KKREAEKKKCAKLAKKEKEAAEKKKR

SEQ ID NO: 768 - protein, 27 aa, Artificial Sequence
  chemically synthesized
KKRCKDLAKNKKKGHKKKGRNENRKKR

SEQ ID NO: 769 - protein, 35 aa, Artificial Sequence
  chemically synthesized
KKRKEAAEKKKCEKAAKKRKEAAEKKKCEKSAKKR

SEQ ID NO: 770 - protein, 35 aa, Artificial Sequence
  chemically synthesized
KKRKEEAEKKKCEKTAKKRKEAAEKKKCEKAAKKR

SEQ ID NO: 771 - protein, 35 aa, Artificial Sequence
  chemically synthesized
KKRKEAAEKKKCEKAAKKRKEEAEKKKCEKTAKKR

SEQ ID NO: 772 - protein, 35 aa, Artificial Sequence
  chemically synthesized
KKRKEEAEKKKCEKTAKKRKETAEKKKCEKAAKKR

SEQ ID NO: 773 - protein, 35 aa, Artificial Sequence
  chemically synthesized
KKRKETAEKKKCEKAAKKRKQAAEKKKCEKAAKKR

SEQ ID NO: 774 - protein, 29 aa, Artificial Sequence
  chemically synthesized
KKRGSKTSELKQNETTDAVVVNNEKVKKR

SEQ ID NO: 775 - protein, 26 aa, Artificial Sequence
  chemically synthesized
KKRKSAIDVLKMPLFDILRSSPPKKR

SEQ ID NO: 776 - protein, 42 aa, Artificial Sequence
  chemically synthesized
KKRFNLNLEEARQAFQTFKPDWNKIRYDAMKMQTSLGQMKKR

SEQ ID NO: 777 - protein, 38 aa, Artificial Sequence
  chemically synthesized
KKRSDKRARSESKSRSRSGGRRSRSNSPPNRSPSPKKR

SEQ ID NO: 778 - protein, 34 aa, Artificial Sequence
  chemically synthesized
KKRGVVLKPSVDEETDRRRMLNRIAAVRYREKKR

SEQ ID NO: 779 - protein, 36 aa, Artificial Sequence
  chemically synthesized
KKRFHEMAEKDKQRYEAEMQNYVPPKGAVVGRGKKR

SEQ ID NO: 780 - protein, 36 aa, Artificial Sequence
  chemically synthesized
KKRQHSSRSNESVSSSTSTEKSHKKTKKTKMKEKKR

SEQ ID NO: 781 - protein, 37 aa, Artificial Sequence; identical to SEQ ID NO: 762
  chemically synthesized

SEQ ID NO: 782 - protein, 30 aa, Artificial Sequence
  chemically synthesized
KKRMDDFVSQVGEDRLATYKPFTEDPSKKR

SEQ ID NO: 783 - protein, 28 aa, Artificial Sequence
  chemically synthesized
KKRSKKRNSIDSGRKDKSKKRKSKKKKR

SEQ ID NO: 784 - protein, 31 aa, Artificial Sequence
  chemically synthesized
KKRDSKNRRSHSKSDENEEGEEDDEERRKKR

SEQ ID NO: 785 - protein, 42 aa, Artificial Sequence
  chemically synthesized
KKRLFEDFTNLYIEDDCLLSCSFSFFIYNKSIHLHFNVDKKR

SEQ ID NO: 786 - protein, 26 aa, Artificial Sequence
  chemically synthesized
KKRIPNATEEEIEILEGMLCWNPKKR

SEQ ID NO: 787 - protein, 46 aa, Artificial Sequence
  chemically synthesized
KKRKKDRDHNNNNNNNNNNNNNNNEQTSDSSDSSDSDSESRSKKKR

SEQ ID NO: 788 - protein, 26 aa, Artificial Sequence
  chemically synthesized
KKRAAEQKIIDDEKARLKSIENSKKR

SEQ ID NO: 789 - protein, 38 aa, Artificial Sequence
  chemically synthesized
KKRKCNFSSPLLFSPFKYGVTSPFSPSKMKLKSPFKKR

SEQ ID NO: 790 - protein, 36 aa, Artificial Sequence
  chemically synthesized
KKRLKREKRLKEKQDLLLIKLEKQKEKQLEEQMKKR

SEQ ID NO: 791 - protein, 27 aa, Artificial Sequence
  chemically synthesized
KKRIKFTHMVGRGQYGKVYDALYDKKR

SEQ ID NO: 792 - protein, 35 aa, Artificial Sequence
  chemically synthesized
KKRREKEARKMKRAGGRFKSRATGANAEEKRAKKR

SEQ ID NO: 793 - protein, 39 aa, Artificial Sequence
  chemically synthesized
KKRLQKEEQDRLAAAELERKRLEKEAEEKRIAQELEKKR

SEQ ID NO: 794 - protein, 31 aa, Artificial Sequence
  chemically synthesized
KKRKITSSEYGMSLEFFKKNPKKVVQNLKKR

SEQ ID NO: 795 - protein, 41 aa, Artificial Sequence
  chemically synthesized
KKRDLIKNNKLIHNVDVNYINMITNDNHISSEKCRDIKKKR

SEQ ID NO: 796 - protein, 46 aa, Artificial Sequence
  chemically synthesized
KKRIYGYLFYTTLLKNITSLNNLFVHYILNNYFFFHSKSMYMLKKR

SEQ ID NO: 797 - protein, 31 aa, Artificial Sequence
  chemically synthesized
KKRIFIYENTVYYTPDDCVFCTQLNCTIKKR

SEQ ID NO: 798 - protein, 44 aa, Artificial Sequence
  chemically synthesized
KKRRNEETRSARSVGIAAADARQAAIVAEKTSGPSLLEIHQKKR

SEQ ID NO: 799 - protein, 39 aa, Artificial Sequence
  chemically synthesized
KKRPGTTSKKSIATVTASPEMSSKTTQMEPEQDGEGKKR

SEQ ID NO: 800 - protein, 29 aa, Artificial Sequence
  chemically synthesized
KKRLARGGHVEDPTADPLDISLPSSKKKR

SEQ ID NO: 801 - protein, 27 aa, Artificial Sequence
  chemically synthesized
KKRSDESDDDNIGLVARGSPRFFGKKR

SEQ ID NO: 802 - protein, 45 aa, Artificial Sequence
  chemically synthesized
KKRADDEDILLGERGSPRFFGKKRANDENISFSLRGSPRFFGKKR

SEQ ID NO: 803 - protein, 46 aa, Artificial Sequence
  chemically synthesized
KKRSDDNVALDLRGSPRFFGKRQSSDLDDEISVALRGSPRFFGKKR

SEQ ID NO: 804 - protein, 34 aa, Artificial Sequence
  chemically synthesized
KKRTEDGRPTLSAHPARFSPEDKYSRQRLTIKKR

SEQ ID NO: 805 - protein, 32 aa, Artificial Sequence
  chemically synthesized
KKRRVEKKKSKTKWTERKQKVEHDKEKRQKKR

SEQ ID NO: 806 - protein, 37 aa, Artificial Sequence
  chemically synthesized
KKRPRQPRKRIVMVEEVKRKIRTPIKEEEEVQERKKR

SEQ ID NO: 807 - protein, 33 aa, Artificial Sequence
  chemically synthesized
KKRVQILYIESESEDEDEQDSHDKSLDSPEKKR

SEQ ID NO: 808 - protein, 34 aa, Artificial Sequence
  chemically synthesized
KKRKRGVVNTKAYKETKPAVKKETKATPALHKKR

SEQ ID NO: 809 - protein, 40 aa, Artificial Sequence
  chemically synthesized
KKRKCVITLDEKQVESKRLKKEESNVEATSRPPAQSPKKR

SEQ ID NO: 810 - protein, 37 aa, Artificial Sequence
  chemically synthesized
KKRKKPQTAAKSSSRSDSDSDWANNKAGAPSSKKKKR

SEQ ID NO: 811 - protein, 39 aa, Artificial Sequence
  chemically synthesized
KKRKRKEEGEKEKKPRKKVPKQLGVMALNSHKSEKKKKR

SEQ ID NO: 812 - protein, 33 aa, Artificial Sequence
  chemically synthesized
KKRKKVSGPNPLSCLKKKKKTQDTNSSASEKKR

SEQ ID NO: 813 - protein, 33 aa, Artificial Sequence; identical to SEQ ID NO: 695
  chemically synthesized

SEQ ID NO: 814 - protein, 40 aa, Artificial Sequence
  chemically synthesized
KKRLEDEQEMVRMVRAATLIQALWKGYLVRSMLKSKKKKR

SEQ ID NO: 815 - protein, 32 aa, Artificial Sequence
  chemically synthesized
KKRSREDVGDNDDTEGAIGVRNKVAGGKMKKR

SEQ ID NO: 816 - protein, 39 aa, Artificial Sequence
  chemically synthesized
KKREEMEEENRKIIEFAKLQQQREEDRMAKVQEKVKKKR

SEQ ID NO: 817 - protein, 31 aa, Artificial Sequence
  chemically synthesized
KKRRQYQEEEVLDGPGVNTAQKAKKKKQKKR

SEQ ID NO: 818 - protein, 37 aa, Artificial Sequence
  chemically synthesized
KKRKQKEEEEPTTTERSAEKYSEHTDESIRKSKKKKR

SEQ ID NO: 819 - protein, 41 aa, Artificial Sequence
  chemically synthesized
KKREGSSAQAPASKKPKEEIPVIPKGKPKSGRVWKDRSKKR

SEQ ID NO: 820 - protein, 26 aa, Artificial Sequence
  chemically synthesized
KKRKLDPEIVPEEKDCGDDEGNSKKR

SEQ ID NO: 821 - protein, 39 aa, Artificial Sequence
  chemically synthesized
KKRMEAEQEMVRMVRAATLIQAFWKGYLVRSLLRSKKKR

SEQ ID NO: 822 - protein, 45 aa, Artificial Sequence
  chemically synthesized
KKRSTSVMSFFSKVSWNLRLQKQEPLKNVFFILAETARDPSVKKR

SEQ ID NO: 823 - protein, 41 aa, Artificial Sequence
  chemically synthesized
KKRHKKEKRKKEKDRGRRLDSSLAPAPIQHDSDSSTCCKKR

SEQ ID NO: 824 - protein, 40 aa, Artificial Sequence
  chemically synthesized
KKRIERFYHCLQHALEKETVSTTSQPKEKVNTSYIRKKKR

SEQ ID NO: 825 - protein, 33 aa, Artificial Sequence; identical to SEQ ID NO: 695
  chemically synthesized

SEQ ID NO: 826 - protein, 27 aa, Artificial Sequence
  chemically synthesized
KKRKERFGIVTSSAGTGTTEDTEAKKR

SEQ ID NO: 827 - protein, 29 aa, Artificial Sequence
  chemically synthesized
KKRKKGEKQIPGEEKGRKRRRVKEDKKKR

SEQ ID NO: 828 - protein, 42 aa, Artificial Sequence
  chemically synthesized
KKRKGSSSLAPASKKLNKEELPVIPKGKPKSGRVWKDRSKKR

SEQ ID NO: 829 - protein, 45 aa, Artificial Sequence; identical to SEQ ID NO: 685
  chemically synthesized

SEQ ID NO: 830 - protein, 35 aa, Artificial Sequence
  chemically synthesized
KKRKDEGKSRTTPPERPLTEVKAETRAEEAPEKKR

SEQ ID NO: 831 - protein, 35 aa, Artificial Sequence
  chemically synthesized
KKRKEEGKSRTTPPERPLTEVKAETRAEEAPEKKR

SEQ ID NO: 832 - protein, 35 aa, Artificial Sequence; identical to SEQ ID NO: 690
  chemically synthesized

SEQ ID NO: 833 - protein, 35 aa, Artificial Sequence; identical to SEQ ID NO: 690
  chemically synthesized

SEQ ID NO: 834 - protein, 35 aa, Artificial Sequence; identical to SEQ ID NO: 717
  chemically synthesized

SEQ ID NO: 835 - protein, 43 aa, Artificial Sequence
  chemically synthesized
KKRKALEAKKEEEEIQREMVKLRREIIERRRTVKEAWKIEKKR

SEQ ID NO: 836 - protein, 41 aa, Artificial Sequence; identical to SEQ ID NO: 691
  chemically synthesized

SEQ ID NO: 837 - protein, 37 aa, Artificial Sequence
  chemically synthesized
KKRILESHNNTLVDPCEEHKKKNPDASVKFSEFLKKR

SEQ ID NO: 838 - protein, 34 aa, Artificial Sequence
  chemically synthesized
KKRLRMLAVLGVELVFMLAVILGVLLGAHTHKKR

SEQ ID NO: 839 - protein, 37 aa, Artificial Sequence
  chemically synthesized
KKRKRGDDDYALPGDGDLVVECEEEGEKGEKRVKKKR

SEQ ID NO: 840 - protein, 40 aa, Artificial Sequence
  chemically synthesized
KKRKKRKRGDDDYALPGDGDLVVECEEEGEKGEKRVKKKR

SEQ ID NO: 841 - protein, 43 aa, Artificial Sequence
  chemically synthesized
KKRKRGDDDYALPGDGDLVVECEEEGEKGEKRVKKKRRSRKKR

SEQ ID NO: 842 - protein, 46 aa, Artificial Sequence
  chemically synthesized
KKRKKRKRGDDDYALPGDGDLVVECEEEGEKGEKRVKKKRRSRKKR

SEQ ID NO: 843 - protein, 37 aa, Artificial Sequence; identical to SEQ ID NO: 839
  chemically synthesized

SEQ ID NO: 844 - protein, 40 aa, Artificial Sequence; identical to SEQ ID NO: 840
  chemically synthesized

SEQ ID NO: 845 - protein, 43 aa, Artificial Sequence; identical to SEQ ID NO: 841
  chemically synthesized

SEQ ID NO: 846 - protein, 46 aa, Artificial Sequence; identical to SEQ ID NO: 842
  chemically synthesized

SEQ ID NO: 847 - protein, 28 aa, Artificial Sequence
  chemically synthesized
KKRNPESALLNQEKNIEENYAESTIKKR

SEQ ID NO: 848 - protein, 28 aa, Artificial Sequence
  chemically synthesized
KKRNPESALSNQEKNIEKNYAESKIKKR

SEQ ID NO: 849 - protein, 45 aa, Artificial Sequence
  chemically synthesized
KKRDKGEKKDFCFLTVWGMETELPFGSAQKKPSFFEPISKELKKR

SEQ ID NO: 850 - protein, 28 aa, Artificial Sequence
  chemically synthesized
KKRNPESALLNQEKNIEENFAESMIKKR

SEQ ID NO: 851 - protein, 31 aa, Artificial Sequence
  chemically synthesized
KKRQDKKNPGSDAQNQKDVEEDSTRSDSKKR

SEQ ID NO: 852 - protein, 28 aa, Artificial Sequence
  chemically synthesized
KKRKKKDEGLDEDDYLLLQDNNVKFKKR

SEQ ID NO: 853 - protein, 27 aa, Artificial Sequence
  chemically synthesized
KKRKSLERYGSITSAVSDDKGDTTKKR

SEQ ID NO: 854 - protein, 39 aa, Artificial Sequence
  chemically synthesized
KKRHYGGESSLAGTQSSIIMRTAAEMLAVYQACGIKKKR

SEQ ID NO: 855 - protein, 36 aa, Artificial Sequence
  chemically synthesized
KKRGRNIDDAEEVENELKRVEDELYKIPDHLKVKKR

SEQ ID NO: 856 - protein, 27 aa, Artificial Sequence
  chemically synthesized
KKREEEAEQARKREEEREKEEEMAKKR

SEQ ID NO: 857 - protein, 32 aa, Artificial Sequence
  chemically synthesized
KKREEEEARKREEERKREEEEAKRREEERKKR

SEQ ID NO: 858 - protein, 44 aa, Artificial Sequence
  chemically synthesized
KKRRGRPRKYGPDSGEMSLGLNPGAPSFTVSQPSSGGDGGEKKR

SEQ ID NO: 859 - protein, 34 aa, Artificial Sequence
  chemically synthesized
KKRQDFVKDRRWIKREYDEFKVRINGLPEQIKKR

SEQ ID NO: 860 - protein, 44 aa, Artificial Sequence
  chemically synthesized
KKRKLETCDETWKREVVQAEEAKGGGEQKSESKKAKKQDKEKKR

SEQ ID NO: 861 - protein, 30 aa, Artificial Sequence
  chemically synthesized
KKRKPREWWKEEFCEELTRKKRKKKKKKKR

SEQ ID NO: 862 - protein, 37 aa, Artificial Sequence
  chemically synthesized
KKRGLSSISSIDSWFHRDDGASSVHDHNLNPTKRKKR

SEQ ID NO: 863 - protein, 45 aa, Artificial Sequence
  chemically synthesized
KKRKKKKKKKRGLSSISSIDSWFHRDDGASSVHDHNLNPTKRKKR

SEQ ID NO: 864 - protein, 27 aa, Artificial Sequence
  chemically synthesized
KKRRRATKKPYSRSIVGATLEVIQKKR

SEQ ID NO: 865 - protein, 37 aa, Artificial Sequence
  chemically synthesized
KKRVDSVVIGRSSKARRGHREPRKARSSGRLEAEKKR

SEQ ID NO: 866 - protein, 45 aa, Artificial Sequence
  chemically synthesized
KKRNKKFTISIKLFKKFYKNKLNENGEYKIESQILQNEKELNKKR

SEQ ID NO: 867 - protein, 39 aa, Artificial Sequence
  chemically synthesized
KKRIYLISDRNPSTGETGWYDKDKGRESKKGIWQIFKKR

SEQ ID NO: 868 - protein, 37 aa, Artificial Sequence
  chemically synthesized
KKRIAKAKSEAAEYQKLLASRLKEQREKRSESLAKKR

SEQ ID NO: 869 - protein, 27 aa, Artificial Sequence
  chemically synthesized
KKRRRTTKKPYSRSIVGATLEVIQKKR

SEQ ID NO: 870 - protein, 45 aa, Artificial Sequence
  chemically synthesized
KKRRAKVFKLAKGFKGAHNSLFRTAKQQVLKALRYSYVGRKRKKR

SEQ ID NO: 871 - protein, 37 aa, Artificial Sequence
  chemically synthesized
KKRIAKANSDAADYQKLLASRLKEQRDRRSESLAKKR

SEQ ID NO: 872 - protein, 29 aa, Artificial Sequence
  chemically synthesized
KKRFLDEMNKKKSCLKMVAQFFFQFKKKR

SEQ ID NO: 873 - protein, 43 aa, Artificial Sequence
  chemically synthesized
KKRTNLKKGPQSKLTKKKKERKVDKTRAIINEIERVLKEKKKR

SEQ ID NO: 874 - protein, 46 aa, Artificial Sequence
  chemically synthesized
KKRFLDEMNKKKSCLKMVAQFFFQFKKKRKNKKIDKAIKGINKKKR

SEQ ID NO: 875 - protein, 32 aa, Artificial Sequence
  chemically synthesized
KKRNKMQDLTNRANKARNEIERIRKEKKKKKR

SEQ ID NO: 876 - protein, 34 aa, Artificial Sequence
  chemically synthesized
KKRASVRKICQKCRLTRRRGRIRVICSNPRHKKR

SEQ ID NO: 877 - protein, 29 aa, Artificial Sequence
  chemically synthesized
KKRRTLQEWQIQPKKYLLEKHNIKVLKKR

SEQ ID NO: 878 - protein, 45 aa, Artificial Sequence
  chemically synthesized
KKRRAKIFKLAKGFKGAHKCLFRTAKQQVLKALRYSYVGRKRKKR

SEQ ID NO: 879 - protein, 46 aa, Artificial Sequence
  chemically synthesized
KKRLTAAQVLEHTWILNAKKAPNVSLGETVKARLKQFSVMNKLKKR

SEQ ID NO: 880 - protein, 29 aa, Artificial Sequence
  chemically synthesized
KKRLTLKHRIEIVMGIICMIVAGFQEKKR

SEQ ID NO: 881 - protein, 28 aa, Artificial Sequence
  chemically synthesized
KKRIDNFKKEALLKANPQIQANPQLKKR

SEQ ID NO: 882 - protein, 46 aa, Artificial Sequence
  chemically synthesized
KKRLSAAQVLEHSWIQNAKKAPNVSLGETVKARLKQFSVMNKLKKR

SEQ ID NO: 883 - protein, 28 aa, Artificial Sequence
  chemically synthesized
KKRRGRPRKYEANGAPLPSSSVPLVKKR

SEQ ID NO: 884 - protein, 36 aa, Artificial Sequence
  chemically synthesized
KKRGYNGKVIALIVALSTVISIMLVLLFLFMMYKKR

SEQ ID NO: 885 - protein, 27 aa, Artificial Sequence
  chemically synthesized
KKRDASFVQPDERTAQTFSTKNKEKKR

SEQ ID NO: 886 - protein, 33 aa, Artificial Sequence
  chemically synthesized
KKRKLEAEAEVVVVEAAAATSTDEATKSSKKKR

SEQ ID NO: 887 - protein, 46 aa, Artificial Sequence
  chemically synthesized
KKRSRATSTDKNKRARVNKRAQKNVEMSGDNNEGEEEEGETKLKKR

SEQ ID NO: 888 - protein, 27 aa, Artificial Sequence
  chemically synthesized
KKRVSDESDSDSDSGDRKRRRRSMKKR

SEQ ID NO: 889 - protein, 45 aa, Artificial Sequence
  chemically synthesized
KKRKRSKPLRPAPSRVLRSTSEKKNKAHNELLNDGAGVQPAEKKR

SEQ ID NO: 890 - protein, 26 aa, Artificial Sequence
  chemically synthesized
KKRKRSSKKDKHRRSKQRDKRHEKKR

SEQ ID NO: 891 - protein, 44 aa, Artificial Sequence
  chemically synthesized
KKRSMRDKRPKRKSRRSPDSLEDSNSGSEASLSDVNVEIGAKKR

SEQ ID NO: 892 - protein, 41 aa, Artificial Sequence
  chemically synthesized
KKRKSKKNKRHKKHSSRTVEETDESSTGSEDSREKRGSKKR

SEQ ID NO: 893 - protein, 40 aa, Artificial Sequence
  chemically synthesized
KKREEQLEKARLAMERKRKLHEKAAAKAVIRVKKEAEKKR

SEQ ID NO: 894 - protein, 34 aa, Artificial Sequence
  chemically synthesized
KKRLRMLAVLGVELVFMLAVILGVLLSAHTHKKR

SEQ ID NO: 895 - protein, 44 aa, Artificial Sequence
  chemically synthesized
KKRKGSETEGWENLPDDLSCSTASRSSNFRSHFSLEGYARLKKR

SEQ ID NO: 896 - protein, 41 aa, Artificial Sequence
  chemically synthesized
KKRVYKDKSRCYECGDEGHLSYECPKNQLGPRERPPPPKKR

SEQ ID NO: 897 - protein, 29 aa, Artificial Sequence
  chemically synthesized
KKRMEALNLPKLSQILNSTSVKISPMKKR

SEQ ID NO: 898 - protein, 30 aa, Artificial Sequence
  chemically synthesized
KKRSIPRTPEKKMVDVKRVHIQRRGVGKKR

SEQ ID NO: 899 - protein, 26 aa, Artificial Sequence
  chemically synthesized
KKRVKTQCVIKSSDKSDHDTLLKKKR

SEQ ID NO: 900 - protein, 27 aa, Artificial Sequence
  chemically synthesized
KKRVYRLVKASDVKSKEHVKNKSGKKR

SEQ ID NO: 901 - protein, 27 aa, Artificial Sequence
  chemically synthesized
KKRPGVSPGDRSGGKGRPTSRMGNKKR

SEQ ID NO: 902 - protein, 36 aa, Artificial Sequence
  chemically synthesized
KKRNTCSVSSQTRKVSLKISKINGVGVRCTPNSKKR

SEQ ID NO: 903 - protein, 37 aa, Artificial Sequence
  chemically synthesized
KKRQDKLEMSEIKQFFDRPIMKAAKELNVGLTVLKKR

SEQ ID NO: 904 - protein, 43 aa, Artificial Sequence
  chemically synthesized
KKRNLKKKRQDKLEMSEIKQFFDRPIMKAAKELNVGLTVLKKR

SEQ ID NO: 905 - protein, 29 aa, Artificial Sequence
  chemically synthesized
KKRKLYDAMKISQSRKRSGVEIIEQRKKR

SEQ ID NO: 906 - protein, 36 aa, Artificial Sequence
  chemically synthesized
KKRGYNSQVLALIVALSGVTVILLALLFFFVMYKKR

SEQ ID NO: 907 - protein, 39 aa, Artificial Sequence
  chemically synthesized
KKRQPEFRMLGKDHLSDQESVEVRVPDSIKKPIDSSKKR

SEQ ID NO: 908 - protein, 37 aa, Artificial Sequence
  chemically synthesized
KKRVAKAKSEAAEYQKLLASRLKEQRDRRSESLAKKR

SEQ ID NO: 909 - protein, 29 aa, Artificial Sequence
  chemically synthesized
KKRKEETVLLPSGVQGLGMGLPDMRSKKR

SEQ ID NO: 910 - protein, 39 aa, Artificial Sequence
  chemically synthesized
KKRVKKLKSKKLEAEEELNNVQEIDAHDIVMEQKSDKKR

SEQ ID NO: 911 - protein, 38 aa, Artificial Sequence
  chemically synthesized
KKRKKTPNGDPQRLGIDTLLPQCLRGAPAAARRKRKKR

SEQ ID NO: 912 - protein, 36 aa, Artificial Sequence
  chemically synthesized
KKRRAPPPPSPGLLGQDKVSEKASLSSQADLQKKKR

SEQ ID NO: 913 - protein, 39 aa, Artificial Sequence; identical to SEQ ID NO: 709
  chemically synthesized

SEQ ID NO: 914 - protein, 42 aa, Artificial Sequence
  chemically synthesized
KKRMRLEEENEGLRQRLIETELAKQVLQTELDRPREHSLKKR

SEQ ID NO: 915 - protein, 33 aa, Artificial Sequence
  chemically synthesized
KKRAKMGKLKDKFKTELESTSEILGFDVKTKKR

SEQ ID NO: 916 - protein, 45 aa, Artificial Sequence
  chemically synthesized
KKRKKLKSEGTTSEKKAASQQDAVTEGAMPAATGKDQPPSTGKKR

SEQ ID NO: 917 - protein, 33 aa, Artificial Sequence
  chemically synthesized
KKRKEEERKKKETDQKKEAAVSVQEESDLEKKR

SEQ ID NO: 918 - protein, 29 aa, Artificial Sequence
  chemically synthesized
KKRKKGEKQAPGEEKGRKRRRVKEDKKKR

SEQ ID NO: 919 - protein, 36 aa, Artificial Sequence
  chemically synthesized
KKRSFSGFGSPLDRLSAGSVEHRGKQRKAVDHSKKR

SEQ ID NO: 920 - protein, 36 aa, Artificial Sequence
  chemically synthesized
KKRSFSGFGSPLDRLSAGSVEHRGKQRRVVDHSKKR

SEQ ID NO: 921 - protein, 27 aa, Artificial Sequence
  chemically synthesized
KKRVGDSSALQTIHGKEMSKIARKKKR

SEQ ID NO: 922 - protein, 27 aa, Artificial Sequence
  chemically synthesized
KKRVGDSSALQTIHGKEMSKIARKKKR

SEQ ID NO: 923 - protein, 41 aa, Artificial Sequence; identical to SEQ ID NO: 691
  chemically synthesized

SEQ ID NO: 924 - protein, 39 aa, Artificial Sequence
  chemically synthesized
KKRDKVEASSLPEARAGKRERCSAEDEDCLPPRPKAKKR

SEQ ID NO: 925 - protein, 45 aa, Artificial Sequence
  chemically synthesized
KKRRKKSSGERLKEEKPKKSKTAAASKTKGKSKLNTITPVVGKKR

SEQ ID NO: 926 - protein, 39 aa, Artificial Sequence
  chemically synthesized
KKRKQKEGEEAATTEKSLGDELLGHTDRSFRDSRKKKKR

SEQ ID NO: 927 - protein, 44 aa, Artificial Sequence
  chemically synthesized
KKRQKAERQGTAIGSEEEEAAGESGPRELSTEQSDQPSRKKKKR

SEQ ID NO: 928 - protein, 46 aa, Artificial Sequence
  chemically synthesized
KKRRKQRHEEDGEMGVCDEGGRDVTSRPKAVNSGGDKDPRRSSKKR

SEQ ID NO: 929 - protein, 33 aa, Artificial Sequence
  chemically synthesized
KKRTKMGKLKDKFKTELESTSEIIGFDVKTKKR

SEQ ID NO: 930 - protein, 45 aa, Artificial Sequence
  chemically synthesized
KKREQTASAPATPLVSKHRPSFTRSNTISKPYISNTLPSDAPKKR

SEQ ID NO: 931 - protein, 27 aa, Artificial Sequence
  chemically synthesized
KKRKERFGIVTSSAGTGTTEDTEAKKR

SEQ ID NO: 932 - protein, 42 aa, Artificial Sequence
  chemically synthesized
KKRPKGYVQTRTGRTSLKNSSETVGQKRKKAEETKGLPPKKR

SEQ ID NO: 933 - protein, 33 aa, Artificial Sequence
  chemically synthesized
KKRQRLIDVQDELIRLEPQLKQLQTKYDDLKKR

SEQ ID NO: 934 - protein, 45 aa, Artificial Sequence
  chemically synthesized
KKRKMYEDKPLSSESLSESDCGEVQAKKKKSGEERERTTDKAKKR

SEQ ID NO: 935 - protein, 31 aa, Artificial Sequence
  chemically synthesized
KKRVKQFKNKPQGGKGPKDKFQKANKFNKKR

SEQ ID NO: 936 - protein, 36 aa, Artificial Sequence
  chemically synthesized
KKRQTCEEDLDTQDEEDKDDLTKKERKVRKKDKKKR

SEQ ID NO: 937 - protein, 44 aa, Artificial Sequence
  chemically synthesized
KKRQQYCEEVLDVSNKDDGRTWEAEDGGERSQPHPKARAKKKKR

SEQ ID NO: 938 - protein, 46 aa, Artificial Sequence
  chemically synthesized
KKRRRRHHEEEEEMGVCDEGGRDVTGGPKAVNSGADTDPWRSSKKR

SEQ ID NO: 939 - protein, 46 aa, Artificial Sequence
  chemically synthesized
KKRSSIWQFFSRLFSSSSNATKKPEPPVNLKYNAPTSHVTPSVKKR

SEQ ID NO: 940 - protein, 36 aa, Artificial Sequence
  chemically synthesized
KKRRAPPPPSPKLLGQDKVSEKASLSSQADLQKKKR

SEQ ID NO: 941 - protein, 32 aa, Artificial Sequence
  chemically synthesized
KKRKALEFVTNPDIAAKKKLKKHKNKSEAKKR

SEQ ID NO: 942 - protein, 39 aa, Artificial Sequence
  chemically synthesized
KKRDKVETGGLPESKAGKRERSSAEDEDCLPPRPKLKKR

SEQ ID NO: 943 - protein, 41 aa, Artificial Sequence
  chemically synthesized
KKRVIASPQAPASKKLKEELPVIPKGKPKSGRVWKDRSKKR

SEQ ID NO: 944 - protein, 40 aa, Artificial Sequence
  chemically synthesized
KKRVEAEREMVRMVRAATLIQAMWKGYLVRSMLRSRKKKR

SEQ ID NO: 945 - protein, 27 aa, Artificial Sequence
  chemically synthesized
KKRSLKLTEGKSLVDGNGEKPVMKKKR

SEQ ID NO: 946 - protein, 28 aa, Artificial Sequence
  chemically synthesized
KKRRRRPPKGEEGSEEEETENGPKPKKR

SEQ ID NO: 947 - protein, 37 aa, Artificial Sequence
  chemically synthesized
KKRGGGGGRRSKKGGEFDEFVNDDTDDDLPVSKKKKR

SEQ ID NO: 948 - protein, 28 aa, Artificial Sequence
  chemically synthesized
KKRRREPQTPAQETLESEWPQKAKKKKR

SEQ ID NO: 949 - protein, 33 aa, Artificial Sequence; identical to SEQ ID NO: 917
  chemically synthesized

SEQ ID NO: 950 - protein, 36 aa, Artificial Sequence
  chemically synthesized
KKRSAGIIEDVGGEVQNMLEKFGADINKALLAKKKR

SEQ ID NO: 951 - protein, 45 aa, Artificial Sequence; identical to SEQ ID NO: 684
  chemically synthesized

SEQ ID NO: 952 - protein, 31 aa, Artificial Sequence
  chemically synthesized
KKRAATTVLQELKKLPPLPVIEKPKLFFKKR

SEQ ID NO: 953 - protein, 29 aa, Artificial Sequence
  chemically synthesized
KKRKKGQEAGHEAGGEDAAEANGAPEKKR

SEQ ID NO: 954 - protein, 45 aa, Artificial Sequence; identical to SEQ ID NO: 684
  chemically synthesized

SEQ ID NO: 955 - protein, 34 aa, Artificial Sequence
  chemically synthesized
KKRKRYFMQEEMEAKTMEPVAELPVPSATSSKKR

SEQ ID NO: 956 - protein, 37 aa, Artificial Sequence
  chemically synthesized
KKRKKSKGTETSQVEHTEPVAQTEPPEGTFLFPTKKR

SEQ ID NO: 957 - protein, 43 aa, Artificial Sequence
  chemically synthesized
KKRKRQKEADGTEEVDGIVADSQPQVIVEAQEETILLSPTKKR

SEQ ID NO: 958 - protein, 31 aa, Artificial Sequence
  chemically synthesized
KKRHQEDQDPIFQASDSSGYQSDHNKKKKKR

SEQ ID NO: 959 - protein, 45 aa, Artificial Sequence
  chemically synthesized
KKRHQEDQDPIFQASDSSGYQSDHNKKKKKRKHSEEANFESPKKR

SEQ ID NO: 960 - protein, 45 aa, Artificial Sequence
  chemically synthesized
KKRRTPLLSFLSKVSWKLRLQKRELLKNALFVLAERARDPNAKKR

SEQ ID NO: 961 - protein, 46 aa, Artificial Sequence
  chemically synthesized
KKRKKLKSEGTTPEKNAASQQDAVTEGAMPAATGKDQPPSTGKKKR

SEQ ID NO: 962 - protein, 39 aa, Artificial Sequence; identical to SEQ ID NO: 709
  chemically synthesized

SEQ ID NO: 963 - protein, 26 aa, Artificial Sequence
  chemically synthesized
KKRLRNKRSRSRESSSRPRARKDKKR

SEQ ID NO: 964 - protein, 31 aa, Artificial Sequence
  chemically synthesized
KKRREKAIGEGRVVYIRNLSGDMSSRELKKR

SEQ ID NO: 965 - protein, 35 aa, Artificial Sequence
  chemically synthesized
KKRRRSPSYSPSPVKKKKKKSSKKHKRHRSFSKKR

SEQ ID NO: 966 - protein, 31 aa, Artificial Sequence; identical to SEQ ID NO: 727
  chemically synthesized

SEQ ID NO: 967 - protein, 31 aa, Artificial Sequence
  chemically synthesized
KKRGRTPKILIPHPTSTPSKSAEPLKFPKKR

SEQ ID NO: 968 - protein, 46 aa, Artificial Sequence
  chemically synthesized
KKRLDGIEEVEREINRGRSCKGSEFTCPEDNKIRELTLEIERLKKR

SEQ ID NO: 969 - protein, 38 aa, Artificial Sequence
  chemically synthesized
KKRFGGVQELLSQQKKSGEVAVLKRDGRYIYYLITKKR

SEQ ID NO: 970 - protein, 37 aa, Artificial Sequence
  chemically synthesized
KKRLRRMTPFWRGVSLRPIGASCRDDSECITRLCKKR

SEQ ID NO: 971 - protein, 46 aa, Artificial Sequence
  chemically synthesized
KKRLDGIEEVEREINRGRLCKGSEFTCPEDNKIRELTLEIERLKKR

SEQ ID NO: 972 - protein, 45 aa, Artificial Sequence
  chemically synthesized
KKRKMYEDKPLSSESLSESDCGEVQAKRKKSGEERERTTDKAKKR

SEQ ID NO: 973 - protein, 32 aa, Artificial Sequence
  chemically synthesized
KKRKREDAGDDDDKEGAIGVRNKVAGGKMKKR

SEQ ID NO: 974 - protein, 45 aa, Artificial Sequence
  chemically synthesized
KKRDRAELQPGGPSEDECSDASVEAAEDCVQTPDIQDDVPKPKKR

SEQ ID NO: 975 - protein, 27 aa, Artificial Sequence
  chemically synthesized
KKRKERFGIVTSSAGTGTTEDTEAKKR

SEQ ID NO: 976 - protein, 40 aa, Artificial Sequence
  chemically synthesized
KKRVEAEREMVRMVRAATLIQAVWKGYLVRSILRSKKKKR

SEQ ID NO: 977 - protein, 35 aa, Artificial Sequence
  chemically synthesized
KKRKLKADDTDNVYYNANRKNSKRLNVEVFIPKKR

SEQ ID NO: 978 - protein, 45 aa, Artificial Sequence; identical to SEQ ID NO: 925
  chemically synthesized

SEQ ID NO: 979 - protein, 39 aa, Artificial Sequence
  chemically synthesized
KKRKNISQDTFGTTFGRIHMQKQDLSKLQTRKMKGLKKR

SEQ ID NO: 980 - protein, 43 aa, Artificial Sequence
  chemically synthesized
KKRVIASPQAPASKKLKEKEELPVIPKGKPKSGRVWKDRSKKR

SEQ ID NO: 981 - protein, 37 aa, Artificial Sequence
  chemically synthesized
KKRQRSESHSASERSSSAESERSYKKSKKHKKKSKKR

SEQ ID NO: 982 - protein, 32 aa, Artificial Sequence
  chemically synthesized
KKRQLLDSDEEEDDEGRRQAVSGTPRVHRKKR

SEQ ID NO: 983 - protein, 39 aa, Artificial Sequence; identical to SEQ ID NO: 733
  chemically synthesized

SEQ ID NO: 984 - protein, 32 aa, Artificial Sequence
  chemically synthesized
KKREAAEKEKRARIAKERAEKERLERQQEKKR

SEQ ID NO: 985 - protein, 41 aa, Artificial Sequence
  chemically synthesized
KKRGRKPGSVVAAAAAEAKKKAVKESSIRSVHETVLPIKKR

SEQ ID NO: 986 - protein, 46 aa, Artificial Sequence
  chemically synthesized
KKRKRCGVCVPCLRKEPCGACYNCVNRSTSHQICKMRKCEQLKKKR

SEQ ID NO: 987 - protein, 46 aa, Artificial Sequence; identical to SEQ ID NO: 986
  chemically synthesized

SEQ ID NO: 988 - protein, 31 aa, Artificial Sequence
  chemically synthesized
KKRKRSSTRKASDETDSESETDSRESFKKKR

SEQ ID NO: 989 - protein, 34 aa, Artificial Sequence
  chemically synthesized
KKRKKKHPSKKERKGTIRDYECAETKQKKKHKKR

SEQ ID NO: 990 - protein, 26 aa, Artificial Sequence
  chemically synthesized
KKRRREHGQLWFPEGFIPKEPSKKKR

SEQ ID NO: 991 - protein, 32 aa, Artificial Sequence
  chemically synthesized
KKRMAAELYPVSDHATLQKSGAVMLSLPEKKR

SEQ ID NO: 992 - protein, 36 aa, Artificial Sequence
  chemically synthesized
KKRRAPAPPPAPTQTLPPTSQISLGSPSSHNLLKKR

SEQ ID NO: 993 - protein, 31 aa, Artificial Sequence
  chemically synthesized
KKRKHVKNEEDETNHEKTKQHLKEEKRRKKR

SEQ ID NO: 994 - protein, 46 aa, Artificial Sequence
  chemically synthesized
KKRSSLFSPRKSRKNGNAAAESGRETGKHKSLWKTVFSVYKKDKKR

SEQ ID NO: 995 - protein, 46 aa, Artificial Sequence
  chemically synthesized
KKRKRCGVCVPCLRKEPCGTCYNCVNRSTSHQICKMRKCEQLKKKR

SEQ ID NO: 996 - protein, 27 aa, Artificial Sequence
  chemically synthesized
KKRGLKPSGKRELAHPPSSEPPLPKKR

SEQ ID NO: 997 - protein, 33 aa, Artificial Sequence
  chemically synthesized
KKRKRHRSASRKGRHSGSSSRRKRKEDKKHKKR

SEQ ID NO: 998 - protein, 35 aa, Artificial Sequence
  chemically synthesized
KKRREERRKILEEEEQKKKQEEAERKIREEEEKKR

SEQ ID NO: 999 - protein, 35 aa, Artificial Sequence; identical to SEQ ID NO: 998
  chemically synthesized

SEQ ID NO: 1000 - protein, 26 aa, Artificial Sequence
  chemically synthesized
KKRRREHGQLWFPDGFIPKEPSKKKR

SEQ ID NO: 1001 - protein, 27 aa, Artificial Sequence
  chemically synthesized
KKRRRRDEDSDTEGEQQTQPDGEAKKR

SEQ ID NO: 1002 - protein, 31 aa, Artificial Sequence
  chemically synthesized
KKRRRRDEDSDTEGEQQTQPDGEAKKRRKKR

SEQ ID NO: 1003 - protein, 34 aa, Artificial Sequence
  chemically synthesized
KKRECAANGVDYERAKLLEISAEDAERWERKKKR

SEQ ID NO: 1004 - protein, 39 aa, Artificial Sequence
  chemically synthesized
KKRDEERKRELEERRKKEQEEQLRRLREEEREEDEKKKR

SEQ ID NO: 1005 - protein, 41 aa, Artificial Sequence
  chemically synthesized
KKRSSSRCRSGSDSPARKHSTLAKYRAEVPDRRKKERRKKR

SEQ ID NO: 1006 - protein, 26 aa, Artificial Sequence
  chemically synthesized
KKRRKRPQKAAGSDDDEEQTPQSKKR

SEQ ID NO: 1007 - protein, 30 aa, Artificial Sequence
  chemically synthesized
KKRKKGGSSSGEQGEGGDEGEGGEKKKKKR

SEQ ID NO: 1008 - protein, 26 aa, Artificial Sequence
  chemically synthesized
KKRSYKDLLREEEEIAEQVRKSSKKR

SEQ ID NO: 1009 - protein, 45 aa, Artificial Sequence
  chemically synthesized
KKRKVEKQIPDATKKKKATVKKECFITQERSEEKPDNESNKNKKR

SEQ ID NO: 1010 - protein, 27 aa, Artificial Sequence
  chemically synthesized
KKRHDSPDLSPQEQQTTPDLSLQRKKR

SEQ ID NO: 1011 - protein, 30 aa, Artificial Sequence
  chemically synthesized
KKRKFEKPPDPSVRKRLKLVKEEKLLRKKR

SEQ ID NO: 1012 - protein, 27 aa, Artificial Sequence
  chemically synthesized
KKRRKRPQKGGDGSDDDEDQAPQPKKR

SEQ ID NO: 1013 - protein, 32 aa, Artificial Sequence
  chemically synthesized
KKRRKRPQKGGDGSDDDEDQAPQPKKRQPKKR

SEQ ID NO: 1014 - protein, 33 aa, Artificial Sequence
  chemically synthesized
KKRKKGGGSSGSGGEQGEGGEEGEGGEKKKKKR

SEQ ID NO: 1015 - protein, 34 aa, Artificial Sequence
  chemically synthesized
KKRPEVLTIHENSRQENYETETVQVKQAKPNKKR

SEQ ID NO: 1016 - protein, 39 aa, Artificial Sequence
  chemically synthesized
KKRKHKLQETKGKIKKSESVQNTDPTEEADSSVKKKKKR

SEQ ID NO: 1017 - protein, 44 aa, Artificial Sequence
  chemically synthesized
KKRKNRKKPTILEGKETETPVEKTPEGASGEGKKNKNKKKNKKR

SEQ ID NO: 1018 - protein, 39 aa, Artificial Sequence
  chemically synthesized
KKRKKNFMMMRHSQNVRTKGKRSFREKQIALRDSLLKKR

SEQ ID NO: 1019 - protein, 31 aa, Artificial Sequence
  chemically synthesized
KKRRARSRSNSRSKHRHRSRSRSKSREKKKR

SEQ ID NO: 1020 - protein, 42 aa, Artificial Sequence
  chemically synthesized
KKRRKTCKTSTTDSRSSRLEEDPVGQDIPDESNAQSSPKKKR

SEQ ID NO: 1021 - protein, 39 aa, Artificial Sequence
  chemically synthesized
KKRDEERRRELEERRKKEQEEQLRRLREEEREEEERKKR

SEQ ID NO: 1022 - protein, 26 aa, Artificial Sequence
  chemically synthesized
KKRSYKDLLREEEEIAEQVRKSSKKR

SEQ ID NO: 1023 - protein, 34 aa, Artificial Sequence
  chemically synthesized
KKREREQSETASTAPVEPFTLPKPVEVVVEEKKR

SEQ ID NO: 1024 - protein, 31 aa, Artificial Sequence
  chemically synthesized
KKRAALSILQELKKLPVLPVVEKPKVHYKKR

SEQ ID NO: 1025 - protein, 26 aa, Artificial Sequence
  chemically synthesized
KKRRRREGESDTEEEQTQPDGEGKKR

SEQ ID NO: 1026 - protein, 30 aa, Artificial Sequence
  chemically synthesized
KKRRRREGESDTEEEQTQPDGEGKKRRKKR

SEQ ID NO: 1027 - protein, 31 aa, Artificial Sequence
  chemically synthesized
KKRRPRSRSRSRSKHRHRSKSRSKSREKKKR

SEQ ID NO: 1028 - protein, 34 aa, Artificial Sequence
  chemically synthesized
KKRECAANGVDFERAKLLEISAEDAERWERKKKR

SEQ ID NO: 1029 - protein, 46 aa, Artificial Sequence
  chemically synthesized
KKRKELDDVSEDVETLEMVFESRDLDWEEQTANGDQEAQSNKRKKR

SEQ ID NO: 1030 - protein, 30 aa, Artificial Sequence
  chemically synthesized
KKRAQRILIFLLEFLLDFCTGEDSVDGKKR

SEQ ID NO: 1031 - protein, 41 aa, Artificial Sequence
  chemically synthesized
KKRAPKLRATCSSSGLDNLYNAVANIAKASSLRVEVIHKKR

SEQ ID NO: 1032 - protein, 41 aa, Artificial Sequence; identical to SEQ ID NO: 1031
  chemically synthesized

SEQ ID NO: 1033 - protein, 45 aa, Artificial Sequence
  chemically synthesized
KKRRYFMDIWMKDSSGQEFFIEIKPKKETQPPVKPAHLTTAAKKR

SEQ ID NO: 1034 - protein, 35 aa, Artificial Sequence
  chemically synthesized
KKREILIRSLQMIKRQAVKSAANQRNPMGGSWKKR

SEQ ID NO: 1035 - protein, 37 aa, Artificial Sequence
  chemically synthesized
KKRPCKVKRKLFGSENIRPNKKIPLASDVDNELEKKR

SEQ ID NO: 1036 - protein, 26 aa, Artificial Sequence
  chemically synthesized
KKRMDDTEKRKLQEDRRNEKQDLKKR

SEQ ID NO: 1037 - protein, 28 aa, Artificial Sequence
  chemically synthesized
KKRYRSPSSDRSLSRDRSSSRDRSYKKR

SEQ ID NO: 1038 - protein, 41 aa, Artificial Sequence
  chemically synthesized
KKRRPGRGDTSATSDGGTSPKRPLRDSWNLLPQRRAAHKKR

SEQ ID NO: 1039 - protein, 26 aa, Artificial Sequence
  chemically synthesized
KKRVVGLESCSNVLKTRLMRFALKKR
